(19) United States
(12) Patent Application Publication
(10) Pub. No.: US 2022/0288219 A1
(43) Pub. Date: Sep. 15, 2022

(54) ANTIGEN-BINDING PROTEIN CONSTRUCTS AND USES THEREOF

(71) Applicant: Mythic Therapeutics, Inc., Waltham, MA (US)

(72) Inventors: Alexander J. Nichols, Lincoln, MA (US); Brian P. Fiske, Cambridge, MA (US); Nimish Gera, Waltham, MA (US)

(73) Assignee: Mythic Therapeutics, Inc., Waltham, MA (US)

(21) Appl. No.: 17/624,467

(22) PCT Filed: Jul. 8, 2020
(86) PCT No.: PCT/US2020/041268

§ 371 Date: Jan. 3, 2022

Related U.S. Application Data
(60) Provisional application No. 62/932,864, filed on Nov. 8, 2019.
(60) Provisional application No. 62/902,220, filed on Sep. 18, 2019.
(60) Provisional application No. 62/871,466, filed on Jul. 8, 2019.

(51) Int. Cl. A61K 47/68; A61P 35/00; C07K 16/28

(52) U.S. Cl. CPC A61K 47/6803; A61K 47/6849; A61P 35/00; A61K 47/6867; C07K 16/2803

(57) ABSTRACT

Provided herein are antigen-binding protein constructs capable of specifically binding CD22 or an epitope of CD22 presented on the surface of a target mammalian cell, wherein said antigen binding is pH-dependent. Provided are also uses of said antigen-binding protein constructs.

### CROSS-REFERENCE TO RELATED APPLICATIONS

[0001] This application claims priority to U.S. Provisional Patent Application 62/871,466 filed on Jul. 8, 2019, U.S. Provisional Patent Application 62/902,220 filed on Sep. 18, 2019, and U.S. Provisional Patent Application 62/932,864 filed on Nov. 8, 2019. The contents of each of these applications are incorporated herein by reference in their entireties.

### TECHNICAL FIELD

[0002] The present disclosure relates to the field of biotechnology, and more specifically, to antigen-binding molecules.

### BACKGROUND

[0003] Antibody-drug-conjugates have been designed to combat a variety of diseases. One particular advantage of this approach is the ability for antibody-drug conjugates to have cytostatic or cytotoxic effects. Despite years of development, improved antibody-drug conjugates are desired.

### SUMMARY

[0004] The present invention is based on the concept that antigen-binding protein constructs can be generated that display enhanced efficacy (e.g., one or more of an increase (e.g., a detectable increase) in toxin liberation in a target mammalian cell, an increase (e.g., a detectable increase) in target mammalian cell killing, and an increase (e.g., a detectable increase) in endolysosomal delivery).

[0005] Provided herein are pharmaceutical composition including an effective amount of an antigen-binding protein construct (ABPC) including: a first antigen-binding domain that is capable of specifically binding CD22 or an epitope of CD22 presented on the surface of a target mammalian cell, where: (a) the dissociation rate of the first antigen-binding domain at a pH of about 4.0 to about 6.5 is faster than the dissociation rate at a pH of about 7.0 to about 8.0; or
[0006] (b) the dissociation constant (KD) of the first antigen-binding domain at a pH of about 4.0 to about 6.5 is greater than the KD at a pH of about 7.0 to about 8.0.

[0007] In some embodiments of any of the pharmaceutical compositions described herein, the ABPC is degraded in the target mammalian cell following internalization of the ABPC by the target mammalian cell.

[0008] In some embodiments of any of the pharmaceutical compositions described herein, the ABPC includes a conjugated toxin, radioisotope, drug, or small molecule.

[0009] Also provided herein are pharmaceutical compositions including an effective amount of an antigen-binding protein construct (ABPC) including: a first antigen-binding domain that is capable of specifically binding CD22 or an epitope of CD22 presented on the surface of a target mammalian cell; and a conjugated toxin, radioisotope, drug, or small molecule, where: (a) the dissociation rate of the first antigen-binding domain at a pH of about 4.0 to about 6.5 is faster than the dissociation rate at a pH of about 7.0 to about 8.0; or the dissociation constant (KD) of the first antigen-binding domain at a pH of about 4.0 to about 6.5 is greater than the KD at a pH of about 7.0 to about 8.0; and (b) the composition provides for one or more of: an increase in toxin liberation in the target mammalian cell as compared to a composition including the same amount of a control ABPC; an increase in target mammalian cell killing as compared to a composition including the same amount of a control ABPC; and an increase in endolysosomal delivery in the target mammalian cell as compared to a composition including the same amount of a control ABPC.

[0010] In some embodiments of any of the pharmaceutical compositions described herein the first antigen-binding domain includes one of (a) through (f): (a) a heavy chain variable domain of inotuzumab with one or more amino acids substituted with a histidine, where the heavy chain variable domain of inotuzumab includes SEQ ID NO: 1; and/or a light chain variable domain of inotuzumab with one or more amino acids substituted with a histidine, where the light chain variable domain of inotuzumab includes SEQ ID NO: 2; (b) a heavy chain variable domain of pinatuzumab with one or more amino acids substituted with a histidine, where the heavy chain variable domain of pinatuzumab includes SEQ ID NO: 143; and/or a light chain variable domain of pinatuzumab with one or more amino acids substituted with a histidine, where the light chain variable domain of pinatuzumab includes SEQ ID NO: 144; (c) a heavy chain variable domain of TRPH-222 with one or more amino acids substituted with a histidine, where the heavy chain variable domain of TRPH-222 includes SEQ ID NO: 268; and/or
[0011] a light chain variable domain of TRPH-222 with one or more amino acids substituted with a histidine, where the light chain variable domain of TRPH-222 includes SEQ ID NO: 269; (d) a heavy chain variable domain of ADCT-602 with one or more amino acids substituted with a histidine, where the heavy chain variable domain of ADCT-602 includes SEQ ID NO: 366; and/or a light chain variable domain of ADCT-602 with one or more amino acids substituted with a histidine, where the light chain variable domain of ADCT-602 includes SEQ ID NO: 367; (e) a heavy chain variable domain of 12C5 with one or more amino acids substituted with a histidine, where the heavy chain variable domain of 12C5 includes SEQ ID NO: 410; and/or
[0012] a light chain variable domain of 12C5 with one or more amino acids substituted with a histidine, where the light chain variable domain of 12C5 includes SEQ ID NO: 411; and (f) a heavy chain variable domain of 19A3 with one or more amino acids substituted with a histidine, where the heavy chain variable domain of 19A3 includes SEQ ID NO: 489; and/or a light chain variable domain of 19A3 with one or more amino acids substituted with a histidine, where the light chain variable domain of 19A3 includes SEQ ID NO: 490.

[0013] In some embodiments of any of the pharmaceutical compositions described herein, the pharmaceutical composition of claim 1 or 4, where the first CD22-binding domain includes one of (a) through (f): (a) a heavy chain variable domain including a CDR1, a CDR2, and a CDR3 of SEQ ID NOs: 3-5, respectively, with collectively a total of one or more amino acid positions in SEQ ID NOs: 3-5 substituted with a histidine; and/or a light chain variable domain including a CDR1, a CDR2, and a CDR3 of SEQ ID NOs: 6-8, respectively, with collectively a total of one or more amino acid positions in SEQ ID NOs: 6-8 substituted with a histidine; (b) a heavy chain variable domain including a CDR1, a CDR2, and a CDR3 of SEQ ID NOs: 145-147, respectively, with collectively a total of one or more amino acid positions in SEQ ID NOs: 145-147 substituted with a histidine; and/or a light chain variable domain including a CDR1, a CDR2, and a CDR3 of SEQ ID NOs: 148-150, respectively, with collectively a total of one or more amino acid positions in SEQ ID NOs: 148-150 substituted with a histidine; (c) a heavy chain variable domain including a CDR1, a CDR2, and a CDR3 of SEQ ID NOs: 270-272, respectively, with collectively a total of one or more amino acid positions in SEQ ID NOs: 270-272 substituted with a histidine; and/or a light chain variable domain including a CDR1, a CDR2, and a CDR3 of SEQ ID NOs: 273-275, respectively, with collectively a total of one or more amino acid positions in SEQ ID NOs: 273-275 substituted with a histidine;
[0014] (d) a heavy chain variable domain including a CDR1, a CDR2, and a CDR3 of SEQ ID NOs: 368-370, respectively, with collectively a total of one or more amino acid positions in SEQ ID NOs: 368-370 substituted with a histidine; and/or a light chain variable domain including a CDR1, a CDR2, and a CDR3 of SEQ ID NOs: 371-373, respectively, with collectively a total of one or more amino acid positions in SEQ ID NOs: 371-373 substituted with a histidine; (e) a heavy chain variable domain including a CDR1, a CDR2, and a CDR3 of SEQ ID NOs: 412-414, respectively, with collectively a total of one or more amino acid positions in SEQ ID NOs: 412-414 substituted with a histidine; and/or a light chain variable domain including a CDR1, a CDR2, and a CDR3 of SEQ ID NOs: 415-417, respectively, with collectively a total of one or more amino acid positions in SEQ ID NOs: 415-417 substituted with a histidine; and (f) a heavy chain variable domain including a CDR1, a CDR2, and a CDR3 of SEQ ID NOs: 491-493, respectively, with collectively a total of one or more amino acid positions in SEQ ID NOs: 491-493 substituted with a histidine; and/or a light chain variable domain including a CDR1, a CDR2, and a CDR3 of SEQ ID NOs: 494-496, respectively, with collectively a total of one or more amino acid positions in SEQ ID NOs: 494-496 substituted with a histidine.

[0015] In some embodiments of any of the pharmaceutical compositions described herein, the first antigen-binding domain includes one of (a) through (f): (a) a heavy chain variable domain that is at least 90% identical to SEQ ID NO: 1, where the heavy chain variable domain includes a histidine at one or more positions in SEQ ID NO: 1 selected from the group consisting of: 27, 28, 31, 32, 33, 34, 50, 51, 52, 53, 55, 57, 59, 63, 97, 103, 104, and 110; and/or a light chain variable domain that is at least 90% identical to SEQ ID NO: 2, where the light chain variable domain includes a histidine at one or more positions in SEQ ID NO: 2 selected from the group consisting of: 25, 26, 28, 29, 30, 33, 34, 35, 36, 37, 38, 39, 56, 95, and 97; (b) a heavy chain variable domain that is at least 90% identical to SEQ ID NO: 143, where the heavy chain variable domain includes a histidine at one or more positions in SEQ ID NO: 143 selected from the group consisting of: 27, 28, 31, 34, 35, 50, 53, 55, 57, 59, 98, 101, 102, 104, 106, 107, and 108; and/or a light chain variable domain that is at least 90% identical to SEQ ID NO: 144, where the light chain variable domain includes a histidine at one or more positions in SEQ ID NO: 144 selected from the group consisting of: 25, 29, 30, 36, 37, 38, 39, 55, 94, 95, 97, 99, 100, 101, and 102; (c) a heavy chain variable domain that is at least 90% identical to SEQ ID NO: 268, where the heavy chain variable domain includes a histidine at one or more positions in SEQ ID NO: 268 selected from the group consisting of: 32, 33, 54, 55, 97, 98, 100, 102, 106, 107, and 111; and/or a light chain variable domain that is at least 90% identical to SEQ ID NO: 269, where the light chain variable domain includes a histidine at one or more positions in SEQ ID NO: 269 selected from the group consisting of 53 and 91; (d) a heavy chain variable domain that is at least 90% identical to SEQ ID NO: 366, where the heavy chain variable domain includes a histidine at one or more positions in SEQ ID NO: 366 selected from the group consisting of: 32 and 33; and a light chain variable domain that is at least 90% identical to SEQ ID NO: 367; (e) a heavy chain variable domain that is at least 90% identical to SEQ ID NO: 410, where the heavy chain variable domain includes a histidine at one or more positions in SEQ ID NO: 410 selected from the group consisting of: 27, 29, 32, 50, 52, 53, 54, 55, 58, 59, 99, 100, 102, 103, and 107; and/or a light chain variable domain that is at least 90% identical to SEQ ID NO: 411, where the light chain variable domain includes a histidine at one or more positions in SEQ ID NO: 411 selected from the group consisting of: 24, 28, 29, 30, 34, 35, 52, 53, 57, 91, 92, 93, and 99; and (f) a heavy chain variable domain that is at least 90% identical to SEQ ID NO: 489, where the heavy chain variable domain includes a histidine at one or more positions in SEQ ID NO: 489 selected from the group consisting of 24, 26, 27, 31, 32, 34, 97, 98, 100, 102, 103, 105, 110, and 111; and/or a light chain variable domain that is at least 90% identical to SEQ ID NO: 490, where the light chain variable domain includes a histidine at one or more positions in SEQ ID NO: 490 selected from the group consisting of: 55 and 56.

[0016] In some embodiments of any of the pharmaceutical compositions described herein, the first antigen-binding domain includes one of (a) through (f): (a) a light chain variable domain of SEQ ID NO: 2, SEQ ID NO: 53, SEQ ID NO: 54, SEQ ID NO: 56, SEQ ID NO: 57, SEQ ID NO: 58, SEQ ID NO: 61, SEQ ID NO: 62, SEQ ID NO: 63, SEQ ID NO: 64, SEQ ID NO: 65, SEQ ID NO: 66, SEQ ID NO: 67, SEQ ID NO: 69, SEQ ID NO: 76, SEQ ID NO: 78, SEQ ID NO: 79, SEQ ID NO: 139, SEQ ID NO: 140, SEQ ID NO: 141, or SEQ ID NO: 142, and/or
[0017] a heavy chain variable domain of SEQ ID NO: 1, SEQ ID NO: 14, SEQ ID NO: 15, SEQ ID NO: 18, SEQ ID NO: 19, SEQ ID NO: 20, SEQ ID NO: 21, SEQ ID NO: 22, SEQ ID NO: 23, SEQ ID NO: 24, SEQ ID NO: 25, SEQ ID NO: 26, SEQ ID NO: 28, SEQ ID NO: 30, SEQ ID NO: 32, SEQ ID NO: 36, SEQ ID NO: 38, SEQ ID NO: 44, SEQ ID NO: 45, SEQ ID NO: 51, SEQ ID NO: 84, SEQ ID NO: 85, SEQ ID NO: 86, SEQ ID NO: 87, SEQ ID NO: 88, SEQ ID NO: 89, SEQ ID NO: 90, SEQ ID NO: 94, SEQ ID NO: 95, SEQ ID NO: 96, SEQ ID NO: 97, SEQ ID NO: 98, or SEQ ID NO: 99, SEQ ID NO: 100, SEQ ID NO: 101, SEQ ID NO: 103, SEQ ID NO: 104, SEQ ID NO: 105, SEQ ID NO: 106, SEQ ID NO: 107, SEQ ID NO: 108, SEQ ID NO: 109, SEQ ID NO: 110, SEQ ID NO: 111, SEQ ID NO: 112, SEQ ID NO: 113, SEQ ID NO: 114, SEQ ID NO: 115, SEQ ID NO: 117, SEQ ID NO: 118, SEQ ID NO: 119, SEQ ID NO: 120, SEQ ID NO: 121, SEQ ID NO: 123, SEQ ID NO: 124, SEQ ID NO: 125, SEQ ID NO: 126, SEQ ID NO: 127, SEQ ID NO: 128, SEQ ID NO: 129, SEQ ID NO: 130, SEQ ID NO: 131, SEQ ID NO: 132, SEQ ID NO: 133, SEQ ID NO: 134, SEQ ID NO: 135, SEQ ID NO: 136, SEQ ID NO: 137, or SEQ ID NO: 138, where the first antigen-binding domain does not comprise (i) a light chain variable domain of SEQ ID NO: 2 and a heavy chain variable domain of SEQ ID NO: 1; (ii) a light chain variable domain of SEQ ID NO: 2 and heavy chain variable domain that is not one of SEQ ID NOs: 14, 15, 18-26, 28, 30, 32, 36, 38, 44, 45, 51, 84, 85-90, 94-101, 103-115, 117-121, and 123-138; or (iii) a heavy chain variable domain of SEQ ID NO: 1 and a light chain variable domain that is not one of SEQ ID NOs: 53, 54, 56-58, 61-67, 69, 76, 78, 79, and 139-142;
[0018] (b) a light chain variable domain of SEQ ID NO: 144, SEQ ID NO: 192, SEQ ID NO: 196, SEQ ID NO: 197, SEQ ID NO: 203, SEQ ID NO: 204, SEQ ID NO: 205, SEQ ID NO: 206, SEQ ID NO: 207, SEQ ID NO: 214, SEQ ID NO: 215, SEQ ID NO: 217, SEQ ID NO: 219, SEQ ID NO: 220, SEQ ID NO: 221, or SEQ ID NO: 222, and/or a heavy chain variable domain of SEQ ID NO: 143, SEQ ID NO: 152, SEQ ID NO: 153, SEQ ID NO: 156, SEQ ID NO: 159, SEQ ID NO: 160, SEQ ID NO: 161, SEQ ID NO: 164, SEQ ID NO: 166, SEQ ID NO: 168, SEQ ID NO: 170, SEQ ID NO: 179, SEQ ID NO: 182, SEQ ID NO: 183, SEQ ID NO: 185, SEQ ID NO: 187, SEQ ID NO: 188, SEQ ID NO: 189, SEQ ID NO: 223, SEQ ID NO: 224, SEQ ID NO: 225, SEQ ID NO: 226, SEQ ID NO: 227, SEQ ID NO: 228, SEQ ID NO: 229, SEQ ID NO: 230, SEQ ID NO: 231, SEQ ID NO: 233, SEQ ID NO: 238, SEQ ID NO: 239, SEQ ID NO: 240, or SEQ ID NO: 241, where the first antigen-binding domain does not comprise (i) a light chain variable domain of SEQ ID NO: 144 and a heavy chain variable domain of SEQ ID NO: 143; (ii) a light chain variable domain of SEQ ID NO: 144 and heavy chain variable domain that is not one of SEQ ID NOs: 152, 153, 156, 159-161, 164, 166, 168, 170, 179, 182, 183, 185, 187-189, 223-231, 233, and 238-241; or (iii) a heavy chain variable domain of SEQ ID NO: 143 and a light chain variable domain that is not one of SEQ ID NOs: 192, 196, 197, 203-207, 214, 215, 217, and 219-222; (c) a light chain variable domain of SEQ ID NO: 269, SEQ ID NO: 333, SEQ ID NO: 335, or SEQ ID NO: 339, and/or a heavy chain variable domain of SEQ ID NO: 268, SEQ ID NO: 282, SEQ ID NO: 283, SEQ ID NO: 290, SEQ ID NO: 291, SEQ ID NO: 303, SEQ ID NO: 304, SEQ ID NO: 305, SEQ ID NO: 306, SEQ ID NO: 308, SEQ ID NO: 312, SEQ ID NO: 313, SEQ ID NO: 317, SEQ ID NO: 346, SEQ ID NO: 348, SEQ ID NO: 349, SEQ ID NO: 350, SEQ ID NO: 351, SEQ ID NO: 352, SEQ ID NO: 353, SEQ ID NO: 354, SEQ ID NO: 355, SEQ ID NO: 357, SEQ ID NO: 358, or SEQ ID NO: 363, where the first antigen-binding domain does not comprise (i) a light chain variable domain of SEQ ID NO: 269 and a heavy chain variable domain of SEQ ID NO: 268; (ii) a light chain variable domain of SEQ ID NO: 269 and heavy chain variable domain that is not one of SEQ ID NOs: 282, 283, 290, 291, 303-306, 308, 312, 313, 317, 346, 348-355, 357, 358, and 363; or (iii) a heavy chain variable domain of SEQ ID NO: 268 and a light chain variable domain that is not one of SEQ ID NOs: 333, 335, and 339;
[0019] (d) a light chain variable domain of SEQ ID NO: 367, and/or a heavy chain variable domain of SEQ ID NO: 366, SEQ ID NO: 380, or SEQ ID NO: 381, where the first antigen-binding domain does not comprise (i) a light chain variable domain of SEQ ID NO: 367 and a heavy chain variable domain of SEQ ID NO: 366; or (ii) a light chain variable domain of SEQ ID NO: 367 and heavy chain variable domain that is not one of SEQ ID NOs: 380 and 381; (e) a light chain variable domain of SEQ ID NO: 411, SEQ ID NO: 459, SEQ ID NO: 463, SEQ ID NO: 464, SEQ ID NO: 465, SEQ ID NO: 469, SEQ ID NO: 470, SEQ ID NO: 472, SEQ ID NO: 473, SEQ ID NO: 477, SEQ ID NO: 479, SEQ ID NO: 480, SEQ ID NO: 481 or SEQ ID NO: 487, and/or a heavy chain variable domain of SEQ ID NO: 410, SEQ ID NO: 422, SEQ ID NO: 424, SEQ ID NO: 427, SEQ ID NO: 431, SEQ ID NO: 433, SEQ ID NO: 434, SEQ ID NO: 435, SEQ ID NO: 436, SEQ ID NO: 439, SEQ ID NO: 440, SEQ ID NO: 448, SEQ ID NO: 449, SEQ ID NO: 451, SEQ ID NO: 452, or SEQ ID NO: 456, where the first antigen-binding domain does not comprise (i) a light chain variable domain of SEQ ID NO: 411 and a heavy chain variable domain of SEQ ID NO: 410; (ii) a light chain variable domain of SEQ ID NO: 411 and heavy chain variable domain that is not one of SEQ ID NOs: 422, 424, 427, 431, 433-436, 439, 440, 448, 449, 451, 452, and 456; or (iii) a heavy chain variable domain of SEQ ID NO: 410 and a light chain variable domain that is not one of SEQ ID NOs: 459, 463-465, 469, 470, 472, 473, 477, 479-481, or 487; and (f) a light chain variable domain of SEQ ID NO: 490, SEQ ID NO: 558, or SEQ ID NO: 559, and/or a heavy chain variable domain of SEQ ID NO: 489, SEQ ID NO: 498, SEQ ID NO: 500, SEQ ID NO: 501, SEQ ID NO: 505, SEQ ID NO: 506, SEQ ID NO: 508, SEQ ID NO: 527, SEQ ID NO: 528, SEQ ID NO: 530, SEQ ID NO: 532, SEQ ID NO: 533, SEQ ID NO: 535, SEQ ID NO: 540, or SEQ ID NO: 541, where the first antigen-binding domain does not comprise (i) a light chain variable domain of SEQ ID NO: 490 and a heavy chain variable domain of SEQ ID NO: 489; (ii) a light chain variable domain of SEQ ID NO: 490 and heavy chain variable domain that is not one of SEQ ID NOs: 498, 500, 501, 505, 506, 508, 527, 528, 530, 532, 533, 535, 540, and 541; or (iii) a heavy chain variable domain of SEQ ID NO: 489 and a light chain variable domain that is not one of SEQ ID NOs: 558 and 559.

[0020] In some embodiments of any of the pharmaceutical compositions described herein, the composition provides for: an increase in toxin liberation in the target mammalian cell as compared to a composition including the same amount of a control ABPC; and/or an increase in target mammalian cell killing as compared to a composition including the same amount of a control ABPC.

[0021] In some embodiments of any of the pharmaceutical compositions described herein, the pharmaceutical composition of any one of claims 1-9, where the composition provides for an increase in endolysosomal delivery in the target mammalian cell as compared to a composition including the same amount of a control ABPC.

[0022] In some embodiments of any of the pharmaceutical compositions described herein, the composition: results in a less of a reduction in the level of CD22 presented on the surface of the target mammalian cell as compared to a composition including the same amount of a control ABPC; or does not result in a detectable reduction in the level of CD22 presented on the surface of the target mammalian cell.

[0023] In some embodiments of any of the pharmaceutical compositions described herein, the target mammalian cell is a cancer cell. In some embodiments of any of the pharmaceutical compositions described herein, the ABPC is cytotoxic or cytostatic to the target mammalian cell.

[0024] In some embodiments of any of the pharmaceutical compositions described herein, the ABPC is: cross-reactive with a non-human primate CD22 and human CD22; or cross-reactive with a non-human primate CD22, a human CD22, and one or both of rat CD22 and a mouse CD22.

[0025] In some embodiments of any of the pharmaceutical compositions described herein, the ABPC includes a single polypeptide. In some embodiments of any of the pharmaceutical compositions described herein, the antigen-binding domain is selected from the group consisting of: a VH domain, a VHH domain, a VNAR domain, and a scFv. In some embodiments of any of the pharmaceutical compositions described herein, the ABPC includes two or more polypeptides. In some embodiments of any of the pharmaceutical compositions described herein, the ABPC is an antibody.

[0026] In some embodiments of any of the pharmaceutical compositions described herein, the half-life of the ABPC in vivo is decreased as compared to the half-life of a control ABPC in vivo. In some embodiments of any of the pharmaceutical compositions described herein, the ABPC includes a second antigen-binding domain.

[0027] Also provided herein are antigen-binding protein constructs (ABPCs) including: a first antigen-binding domain that is capable of specifically binding CD22 or an epitope of CD22 presented on the surface of a target mammalian cell, where: (a) the dissociation rate of the first antigen-binding domain at a pH of about 4.0 to about 6.5 is faster than the dissociation rate at a pH of about 7.0 to about 8.0; or (b) the dissociation constant (KD) of the first antigen-binding domain at a pH of about 4.0 to about 6.5 is greater than the KD at a pH of about 7.0 to about 8.0.

[0028] In some embodiments of any of the ABPCs described herein, the ABPC is degraded in the target mammalian cell following internalization of the ABPC by the target mammalian cell.

[0029] In some embodiments of any of the ABPCs described herein, the ABPC includes a conjugated toxin, radioisotope, drug, or small molecule.

[0030] Also provided herein are antigen-binding protein constructs (ABPCs) including: a first antigen-binding domain that is capable of specifically binding CD22 or an epitope of CD22 presented on the surface of a target mammalian cell; and a conjugated toxin, radioisotope, drug, or small molecule, where: (a) the dissociation rate of the first antigen-binding domain at a pH of about 4.0 to about 6.5 is faster than the dissociation rate at a pH of about 7.0 to about 8.0; or
[0031] the dissociation constant (KD) of the first antigen-binding domain at a pH of about 4.0 to about 6.5 is greater than the KD at a pH of about 7.0 to about 8.0; and (b) the composition provides for one or more of: an increase in toxin liberation in the target mammalian cell as compared to a composition including the same amount of a control ABPC; an increase in target mammalian cell killing as compared to a composition including the same amount of a control ABPC; and
[0032] an increase in endolysosomal delivery in the target mammalian cell as compared to a composition including the same amount of a control ABPC.

[0033] In some embodiments of any of the ABPCs described herein, the first antigen-binding domain includes one of (a) through (f): (a) a heavy chain variable domain of inotuzumab with one or more amino acids substituted with a histidine, where the heavy chain variable domain of inotuzumab includes SEQ ID NO: 1; and/or a light chain variable domain of inotuzumab with one or more amino acids substituted with a histidine, where the light chain variable domain of inotuzumab includes SEQ ID NO: 2; (b) a heavy chain variable domain of pinatuzumab with one or more amino acids substituted with a histidine, where the heavy chain variable domain of pinatuzumab includes SEQ ID NO: 143; and/or a light chain variable domain of pinatuzumab with one or more amino acids substituted with a histidine, where the light chain variable domain of pinatuzumab includes SEQ ID NO: 144; (c) a heavy chain variable domain of TRPH-222 with one or more amino acids substituted with a histidine, where the heavy chain variable domain of TRPH-222 includes SEQ ID NO: 268; and/or a light chain variable domain of TRPH-222 with one or more amino acids substituted with a histidine, where the light chain variable domain of TRPH-222 includes SEQ ID NO: 269; (d) a heavy chain variable domain of ADCT-602 with one or more amino acids substituted with a histidine, where the heavy chain variable domain of ADCT-602 includes SEQ ID NO: 366; and/or a light chain variable domain of ADCT-602 with one or more amino acids substituted with a histidine, where the light chain variable domain of ADCT-602 includes SEQ ID NO: 367; (e) a heavy chain variable domain of 12C5 with one or more amino acids substituted with a histidine, where the heavy chain variable domain of 12C5 includes SEQ ID NO: 410; and/or a light chain variable domain of 12C5 with one or more amino acids substituted with a histidine, where the light chain variable domain of 12C5 includes SEQ ID NO: 411; and (f) a heavy chain variable domain of 19A3 with one or more amino acids substituted with a histidine, where the heavy chain variable domain of 19A3 includes SEQ ID NO: 489; and/or a light chain variable domain of 19A3 with one or more amino acids substituted with a histidine, where the light chain variable domain of 19A3 includes SEQ ID NO: 490.

[0034] In some embodiments of any of the ABPCs described herein, the first CD22-binding domain includes one of (a) through (f): (a) a heavy chain variable domain including a CDR1, a CDR2, and a CDR3 of SEQ ID NOs: 3-5, respectively, with collectively a total of one or more amino acid positions in SEQ ID NOs: 3-5 substituted with a histidine; and/or a light chain variable domain including a CDR1, a CDR2, and a CDR3 of SEQ ID NOs: 6-8, respectively, with collectively a total of one or more amino acid positions in SEQ ID NOs: 6-8 substituted with a histidine; (b) a heavy chain variable domain including a CDR1, a CDR2, and a CDR3 of SEQ ID NOs: 145-147, respectively, with collectively a total of one or more amino acid positions in SEQ ID NOs: 145-147 substituted with a histidine; and/or a light chain variable domain including a CDR1, a CDR2, and a CDR3 of SEQ ID NOs: 148-150, respectively, with collectively a total of one or more amino acid positions in SEQ ID NOs: 148-150 substituted with a histidine; (c) a heavy chain variable domain including a CDR1, a CDR2, and a CDR3 of SEQ ID NOs: 270-272, respectively, with collectively a total of one or more amino acid positions in SEQ ID NOs: 270-272 substituted with a histidine; and/or a light chain variable domain including a CDR1, a CDR2, and a CDR3 of SEQ ID NOs: 273-275, respectively, with collectively a total of one or more amino acid positions in SEQ ID NOs: 273-275 substituted with a histidine; (d) a heavy chain variable domain including a CDR1, a CDR2, and a CDR3 of SEQ ID NOs: 368-370, respectively, with collectively a total of one or more amino acid positions in SEQ ID NOs: 368-370 substituted with a histidine; and/or a light chain variable domain including a CDR1, a CDR2, and a CDR3 of SEQ ID NOs: 371-373, respectively, with collectively a total of one or more amino acid positions in SEQ ID NOs: 371-373 substituted with a histidine; (e) a heavy chain variable domain including a CDR1, a CDR2, and a CDR3 of SEQ ID NOs: 412-414, respectively, with collectively a total of one or more amino acid positions in SEQ ID NOs: 412-414 substituted with a histidine; and/or a light chain variable domain including a CDR1, a CDR2, and a CDR3 of SEQ ID NOs: 415-417, respectively, with collectively a total of one or more amino acid positions in SEQ ID NOs: 415-417 substituted with a histidine; and (f) a heavy chain variable domain including a CDR1, a CDR2, and a CDR3 of SEQ ID NOs: 491-493, respectively, with collectively a total of one or more amino acid positions in SEQ ID NOs: 491-493 substituted with a histidine; and/or a light chain variable domain including a CDR1, a CDR2, and a CDR3 of SEQ ID NOs: 494-496, respectively, with collectively a total of one or more amino acid positions in SEQ ID NOs: 494-496 substituted with a histidine.

[0035] In some embodiments of any of the ABPCs described herein, the first antigen-binding domain includes one of (a) through (f): (a) a heavy chain variable domain that is at least 90% identical to SEQ ID NO: 1, where the heavy chain variable domain includes a histidine at one or more positions in SEQ ID NO: 1 selected from the group consisting of: 27, 28, 31, 32, 33, 34, 50, 51, 52, 53, 55, 57, 59, 63, 97, 103, 104, and 110; and/or a light chain variable domain that is at least 90% identical to SEQ ID NO: 2, where the light chain variable domain includes a histidine at one or more positions in SEQ ID NO: 2 selected from the group consisting of: 25, 26, 28, 29, 30, 33, 34, 35, 36, 37, 38, 39, 56, 95, and 97; (b) a heavy chain variable domain that is at least 90% identical to SEQ ID NO: 143, where the heavy chain variable domain includes a histidine at one or more positions in SEQ ID NO: 143 selected from the group consisting of: 27, 28, 31, 34, 35, 50, 53, 55, 57, 59, 98, 101, 102, 104, 106, 107, and 108; and/or a light chain variable domain that is at least 90% identical to SEQ ID NO: 144, where the light chain variable domain includes a histidine at one or more positions in SEQ ID NO: 144 selected from the group consisting of: 25, 29, 30, 36, 37, 38, 39, 55, 94, 95, 97, 99, 100, 101, and 102; (c) a heavy chain variable domain that is at least 90% identical to SEQ ID NO: 268, where the heavy chain variable domain includes a histidine at one or more positions in SEQ ID NO: 268 selected from the group consisting of: 32, 33, 54, 55, 97, 98, 100, 102, 106, 107, and 111; and/or
[0036] a light chain variable domain that is at least 90% identical to SEQ ID NO: 269, where the light chain variable domain includes a histidine at one or more positions in SEQ ID NO: 269 selected from the group consisting of: 53 and 91; (d) a heavy chain variable domain that is at least 90% identical to SEQ ID NO: 366, where the heavy chain variable domain includes a histidine at one or more positions in SEQ ID NO: 366 selected from the group consisting of 32 and 33; and a light chain variable domain that is at least 90% identical to SEQ ID NO: 367; (e) a heavy chain variable domain that is at least 90% identical to SEQ ID NO: 410, where the heavy chain variable domain includes a histidine at one or more positions in SEQ ID NO: 410 selected from the group consisting of: 27, 29, 32, 50, 52, 53, 54, 55, 58, 59, 99, 100, 102, 103, and 107; and/or
[0037] a light chain variable domain that is at least 90% identical to SEQ ID NO: 411, where the light chain variable domain includes a histidine at one or more positions in SEQ ID NO: 411 selected from the group consisting of: 24, 28, 29, 30, 34, 35, 52, 53, 57, 91, 92, 93, and 99; and (f) a heavy chain variable domain that is at least 90% identical to SEQ ID NO: 489, where the heavy chain variable domain includes a histidine at one or more positions in SEQ ID NO: 489 selected from the group consisting of 24, 26, 27, 31, 32, 34, 97, 98, 100, 102, 103, 105, 110, and 111; and/or a light chain variable domain that is at least 90% identical to SEQ ID NO: 490, where the light chain variable domain includes a histidine at one or more positions in SEQ ID NO: 490 selected from the group consisting of: 55 and 56.

[0038] In some embodiments of any of the ABPCs described herein, the first antigen-binding domain includes one of (a) through (f): (a) a light chain variable domain of SEQ ID NO: 2, SEQ ID NO: 53, SEQ ID NO: 54, SEQ ID NO: 56, SEQ ID NO: 57, SEQ ID NO: 58, SEQ ID NO: 61, SEQ ID NO: 62, SEQ ID NO: 63, SEQ ID NO: 64, SEQ ID NO: 65, SEQ ID NO: 66, SEQ ID NO: 67, SEQ ID NO: 69, SEQ ID NO: 76, SEQ ID NO: 78, SEQ ID NO: 79, SEQ ID NO: 139, SEQ ID NO: 140, SEQ ID NO: 141, or SEQ ID NO: 142, and/or a heavy chain variable domain of SEQ ID NO: 1, SEQ ID NO: 14, SEQ ID NO: 15, SEQ ID NO: 18, SEQ ID NO: 19, SEQ ID NO: 20, SEQ ID NO: 21, SEQ ID NO: 22, SEQ ID NO: 23, SEQ ID NO: 24, SEQ ID NO: 25, SEQ ID NO: 26, SEQ ID NO: 28, SEQ ID NO: 30, SEQ ID NO: 32, SEQ ID NO: 36, SEQ ID NO: 38, SEQ ID NO: 44, SEQ ID NO: 45, SEQ ID NO: 51, SEQ ID NO: 84, SEQ ID NO: 85, SEQ ID NO: 86, SEQ ID NO: 87, SEQ ID NO: 88, SEQ ID NO: 89, SEQ ID NO: 90, SEQ ID NO: 94, SEQ ID NO: 95, SEQ ID NO: 96, SEQ ID NO: 97, SEQ ID NO: 98, or SEQ ID NO: 99, SEQ ID NO: 100, SEQ ID NO: 101, SEQ ID NO: 103, SEQ ID NO: 104, SEQ ID NO: 105, SEQ ID NO: 106, SEQ ID NO: 107, SEQ ID NO: 108, SEQ ID NO: 109, SEQ ID NO: 110, SEQ ID NO: 111, SEQ ID NO: 112, SEQ ID NO: 113, SEQ ID NO: 114, SEQ ID NO: 115, SEQ ID NO: 117, SEQ ID NO: 118, SEQ ID NO: 119, SEQ ID NO: 120, SEQ ID NO: 121, SEQ ID NO: 123, SEQ ID NO: 124, SEQ ID NO: 125, SEQ ID NO: 126, SEQ ID NO: 127, SEQ ID NO: 128, SEQ ID NO: 129, SEQ ID NO: 130, SEQ ID NO: 131, SEQ ID NO: 132, SEQ ID NO: 133, SEQ ID NO: 134, SEQ ID NO: 135, SEQ ID NO: 136, SEQ ID NO: 137, or SEQ ID NO: 138, where the first antigen-binding domain does not comprise (i) a light chain variable domain of SEQ ID NO: 2 and a heavy chain variable domain of SEQ ID NO: 1; (ii) a light chain variable domain of SEQ ID NO: 2 and heavy chain variable domain that is not one of SEQ ID NOs: 14, 15, 18-26, 28, 30, 32, 36, 38, 44, 45, 51, 84, 85-90, 94-101, 103-115, 117-121, and 123-138; or (iii) a heavy chain variable domain of SEQ ID NO: 1 and a light chain variable domain that is not one of SEQ ID NOs: 53, 54, 56-58, 61-67, 69, 76, 78, 79, and 139-142;
[0039] (b) a light chain variable domain of SEQ ID NO: 144, SEQ ID NO: 192, SEQ ID NO: 196, SEQ ID NO: 197, SEQ ID NO: 203, SEQ ID NO: 204, SEQ ID NO: 205, SEQ ID NO: 206, SEQ ID NO: 207, SEQ ID NO: 214, SEQ ID NO: 215, SEQ ID NO: 217, SEQ ID NO: 219, SEQ ID NO: 220, SEQ ID NO: 221, or SEQ ID NO: 222, and/or a heavy chain variable domain of SEQ ID NO: 143, SEQ ID NO: 152, SEQ ID NO: 153, SEQ ID NO: 156, SEQ ID NO: 159, SEQ ID NO: 160, SEQ ID NO: 161, SEQ ID NO: 164, SEQ ID NO: 166, SEQ ID NO: 168, SEQ ID NO: 170, SEQ ID NO: 179, SEQ ID NO: 182, SEQ ID NO: 183, SEQ ID NO: 185, SEQ ID NO: 187, SEQ ID NO: 188, SEQ ID NO: 189, SEQ ID NO: 223, SEQ ID NO: 224, SEQ ID NO: 225, SEQ ID NO: 226, SEQ ID NO: 227, SEQ ID NO: 228, SEQ ID NO: 229, SEQ ID NO: 230, SEQ ID NO: 231, SEQ ID NO: 233, SEQ ID NO: 238, SEQ ID NO: 239, SEQ ID NO: 240, or SEQ ID NO: 241, where the first antigen-binding domain does not comprise (i) a light chain variable domain of SEQ ID NO: 144 and a heavy chain variable domain of SEQ ID NO: 143; (ii) a light chain variable domain of SEQ ID NO: 144 and heavy chain variable domain that is not one of SEQ ID NOs: 152, 153, 156, 159-161, 164, 166, 168, 170, 179, 182, 183, 185, 187-189, 223-231, 233, and 238-241; or (iii) a heavy chain variable domain of SEQ ID NO: 143 and a light chain variable domain that is not one of SEQ ID NOs: 192, 196, 197, 203-207, 214, 215, 217, and 219-222; (c) a light chain variable domain of SEQ ID NO: 269, SEQ ID NO: 333, SEQ ID NO: 335, or SEQ ID NO: 339, and/or a heavy chain variable domain of SEQ ID NO: 268, SEQ ID NO: 282, SEQ ID NO: 283, SEQ ID NO: 290, SEQ ID NO: 291, SEQ ID NO: 303, SEQ ID NO: 304, SEQ ID NO: 305, SEQ ID NO: 306, SEQ ID NO: 308, SEQ ID NO: 312, SEQ ID NO: 313, SEQ ID NO: 317, SEQ ID NO: 346, SEQ ID NO: 348, SEQ ID NO: 349, SEQ ID NO: 350, SEQ ID NO: 351, SEQ ID NO: 352, SEQ ID NO: 353, SEQ ID NO: 354, SEQ ID NO: 355, SEQ ID NO: 357, SEQ ID NO: 358, or SEQ ID NO: 363, where the first antigen-binding domain does not comprise (i) a light chain variable domain of SEQ ID NO: 269 and a heavy chain variable domain of SEQ ID NO: 268; (ii) a light chain variable domain of SEQ ID NO: 269 and heavy chain variable domain that is not one of SEQ ID NOs: 282, 283, 290, 291, 303-306, 308, 312, 313, 317, 346, 348-355, 357, 358, and 363; or (iii) a heavy chain variable domain of SEQ ID NO: 268 and a light chain variable domain that is not one of SEQ ID NOs: 333, 335, and 339;
[0040] (d) a light chain variable domain of SEQ ID NO: 367, and/or a heavy chain variable domain of SEQ ID NO: 366, SEQ ID NO: 380, or SEQ ID NO: 381, where the first antigen-binding domain does not comprise (i) a light chain variable domain of SEQ ID NO: 367 and a heavy chain variable domain of SEQ ID NO: 366; or (ii) a light chain variable domain of SEQ ID NO: 367 and heavy chain variable domain that is not one of SEQ ID NOs: 380 and 381; (e) a light chain variable domain of SEQ ID NO: 411, SEQ ID NO: 459, SEQ ID NO: 463, SEQ ID NO: 464, SEQ ID NO: 465, SEQ ID NO: 469, SEQ ID NO: 470, SEQ ID NO: 472, SEQ ID NO: 473, SEQ ID NO: 477, SEQ ID NO: 479, SEQ ID NO: 480, SEQ ID NO: 481 or SEQ ID NO: 487, and/or a heavy chain variable domain of SEQ ID NO: 410, SEQ ID NO: 422, SEQ ID NO: 424, SEQ ID NO: 427, SEQ ID NO: 431, SEQ ID NO: 433, SEQ ID NO: 434, SEQ ID NO: 435, SEQ ID NO: 436, SEQ ID NO: 439, SEQ ID NO: 440, SEQ ID NO: 448, SEQ ID NO: 449, SEQ ID NO: 451, SEQ ID NO: 452, or SEQ ID NO: 456, where the first antigen-binding domain does not comprise (i) a light chain variable domain of SEQ ID NO: 411 and a heavy chain variable domain of SEQ ID NO: 410; (ii) a light chain variable domain of SEQ ID NO: 411 and heavy chain variable domain that is not one of SEQ ID NOs: 422, 424, 427, 431, 433-436, 439, 440, 448, 449, 451, 452, and 456; or (iii) a heavy chain variable domain of SEQ ID NO: 410 and a light chain variable domain that is not one of SEQ ID NOs: 459, 463-465, 469, 470, 472, 473, 477, 479-481, or 487; and (f) a light chain variable domain of SEQ ID NO: 490, SEQ ID NO: 558, or SEQ ID NO: 559, and/or a heavy chain variable domain of SEQ ID NO: 489, SEQ ID NO: 498, SEQ ID NO: 500, SEQ ID NO: 501, SEQ ID NO: 505, SEQ ID NO: 506, SEQ ID NO: 508, SEQ ID NO: 527, SEQ ID NO: 528, SEQ ID NO: 530, SEQ ID NO: 532, SEQ ID NO: 533, SEQ ID NO: 535, SEQ ID NO: 540, or SEQ ID NO: 541, where the first antigen-binding domain does not comprise (i) a light chain variable domain of SEQ ID NO: 490 and a heavy chain variable domain of SEQ ID NO: 489; (ii) a light chain variable domain of SEQ ID NO: 490 and heavy chain variable domain that is not one of SEQ ID NOs: 498, 500, 501, 505, 506, 508, 527, 528, 530, 532, 533, 535, 540, and 541; or (iii) a heavy chain variable domain of SEQ ID NO: 489 and a light chain variable domain that is not one of SEQ ID NOs: 558 and 559.

[0041] In some embodiments of any of the ABPCs described herein, a composition including the ABPC provides for: an increase in toxin liberation in the target mammalian cell as compared to a composition including the same amount of a control ABPC; and/or an increase in target mammalian cell killing as compared to a composition including the same amount of a control ABPC.

[0042] In some embodiments of any of the ABPCs described herein, a composition including the ABPC provides for an increase in endolysosomal delivery in the target mammalian cell as compared to a composition including the same amount of a control ABPC.

[0043] In some embodiments of any of the ABPCs described herein, a composition including the ABPC: results in a less of a reduction in the level of CD22 presented on the surface of the target mammalian cell as compared to a composition including the same amount of a control ABPC; or does not result in a detectable reduction in the level of CD22 presented on the surface of the target mammalian cell.

[0044] In some embodiments of any of the ABPCs described herein, the target mammalian cell is a cancer cell. In some embodiments of any of the ABPCs described herein, the ABPC is cytotoxic or cytostatic to the target mammalian cell. In some embodiments of any of the ABPCs described herein, the ABPC is: cross-reactive with a non-human primate CD22 and human CD22; or cross-reactive with a non-human primate CD22, a human CD22, and one or both of rat CD22 and a mouse CD22.

[0045] In some embodiments of any of the ABPCs described herein, the ABPC includes a single polypeptide. In some embodiments of any of the ABPCs described herein, the antigen-binding domain is selected from the group consisting of: a VH domain, a VHH domain, a VNAR domain, and a scFv. In some embodiments of any of the ABPCs described herein, the ABPC includes two or more polypeptides. In some embodiments of any of the ABPCs described herein, the ABPC is an antibody.

[0046] In some embodiments of any of the ABPCs described herein, the half-life of the ABPC in vivo is decreased as compared to the half-life of a control ABPC in vivo. In some embodiments of any of the ABPCs described herein, the ABPC includes a second antigen-binding domain.

[0047] Also provided herein are kits including at least one dose of the pharmaceutical composition of any one of the pharmaceutical compositions described herein or any of the ABPCs described herein.

[0048] Also provided herein are methods of treating a cancer characterized by having a population of cancer cells that have CD22 or an epitope of CD22 presented on their surface, the method including: administering a therapeutically effective amount of any one of the pharmaceutical compositions described herein or any one of the ABPCs described herein to a subject identified as having a cancer characterized by having the population of cancer cells.

[0049] Also provided herein are methods of reducing the volume of a tumor in a subject, where the tumor is characterized by having a population of cancer cells that have CD22 or an epitope of CD22 presented on their surface, the method including: administering a therapeutically effective amount of any one of the pharmaceutical compositions described herein or any one of the ABPCs described herein to a subject identified as having a cancer characterized by having the population of cancer cells.

[0050] Also provided herein are methods of inducing cell death in a cancer cell in a subject, where the cancer cell has CD22 or an epitope of CD22 presented on its surface, where the method includes: administering a therapeutically effective amount of any one of the pharmaceutical compositions described herein or any one of the ABPCs described herein to a subject identified as having a cancer characterized by having a population of the cancer cells.

[0051] Also provided herein are methods of decreasing the risk of developing a metastasis or decreasing the risk of developing an additional metastasis in a subject having a cancer, where the cancer is characterized by having a population of cancer cells that have CD22 or an epitope of CD22 presented on their surface the method including: administering a therapeutically effective amount of any one of the pharmaceutical compositions or any one of the ABPCs described herein to a subject identified as having a cancer characterized by having the population of cancer cells.

[0052] As used herein, the term “antigen-binding protein construct” is (i) a single polypeptide that includes at least one antigen-binding domain or (ii) a complex of two or more polypeptides (e.g., the same or different polypeptides) that together form at least one antigen-binding domain. Non-limiting examples and aspects of antigen-binding protein constructs are described herein. Additional examples and aspects of antigen-binding protein constructs are known in the art.

[0053] A “multi-specific antigen-binding protein construct” is an antigen-binding protein construct that includes two or more different antigen-binding domains that collectively specifically bind two or more different epitopes. The two or more different epitopes may be epitopes on the same antigen (e.g., a single polypeptide present on the surface of a cell) or on different antigens (e.g., different proteins present on the surface of the same cell or present on the surface of different cells). In some aspects, the antigen is present on the surface of the cell. In some aspects, a multi-specific antigen-binding protein construct binds two different epitopes (i.e., a “bispecific antigen-binding protein construct”). In some aspects, a multi-specific antigen-binding protein construct binds three different epitopes (i.e., a “trispecific antigen-binding protein construct”). In some aspects, a multi-specific antigen-binding protein construct binds four different epitopes (i.e., a “quadspecific antigen-binding protein construct”). In some aspects, a multi-specific antigen-binding protein construct binds five different epitopes (i.e., a “quintspecific antigen-binding protein construct”). Each binding specificity may be present in any suitable valency. Non-limiting examples of multi-specific antigen-binding protein constructs are described herein.

[0054] An “antigen-binding domain” is one or more protein domain(s) (e.g., formed from amino acids from a single polypeptide or formed from amino acids from two or more polypeptides (e.g., the same or different polypeptides) that is capable of specifically binding to one or more different antigen(s). In some examples, an antigen-binding domain can bind to an antigen or epitope with specificity and affinity similar to that of naturally-occurring antibodies. In some embodiments, the antigen-binding domain can be an antibody or a fragment thereof. In some embodiments, an antigen-binding domain can include an alternative scaffold. Non-limiting examples of antigen-binding domains are described herein. Additional examples of antigen-binding domains are known in the art. In some examples, an antigen-binding domain can bind to a single antigen.

[0055] The term “antibody” is used herein in its broadest sense and includes certain types of immunoglobulin molecules that include one or more antigen-binding domains that specifically bind to an antigen or epitope. An antibody specifically includes, e.g., intact antibodies (e.g., intact immunoglobulins, e.g., human IgG (e.g., human IgG1, human IgG2, human IgG3, human IgG4)), antibody fragments, and multi-specific antibodies. One example of an antigen-binding domain is an antigen-binding domain formed by a VH-VL dimer. Additional examples of an antibody are described herein. Additional examples of an antibody are known in the art.

[0056] The phrase “endosomal/lysosomal pathway” refers to a network of endosomes (early endosomes, multi-vesicular bodies, late endosomes, and lysosomes) in the cytoplasm of a mammalian cell, wherein molecules internalized through cell-mediated internalization processes, e.g., pinocytosis, micropinocytosis, receptor-mediated endocytosis, and/or phagocytosis, are sorted.

[0057] Once the endosomes in the endosomal/lysosomal pathway are purified or isolated, assays for a target protein (e.g., an antigen-binding protein construct described herein) can be performed using methods known in the art (ELISA, Western blot, immunofluorescence, and immunoprecipitation followed by an assay for protein concentration), and can be used to determine the concentration or relative level of the target protein in the endosomes. Alternatively, endosomes in the endosomal/lysosomal pathway can be imaged using immunofluorescence microscopy using an detectably-labelled antibody (e.g., a fluorophore-labelled, a dye-labelled, or a GFP-labelled antibody, e.g., CellLight™ Early Endosome-GFP) that specifically binds to a characteristic protein present in the endosomes (e.g., EEA1 for early endosomes) and a fluorophore-labelled antibody that specifically binds to the protein of interest (e.g., an antigen-binding protein construct), and the level of the target protein in the endosomes can be determined by quantitation of the overlap in the fluorescence emissions of the two different antibodies.

[0058] The phrase “endolysosomal delivery” refers to rate of accumulation over time or the total accumulation at a specific timepoint of an antigen-binding protein construct (e.g., any of the antigen-binding protein constructs described herein) in the endosomal/lysosomal pathway in a mammalian cell (e.g., any of the exemplary target mammalian cells described herein).

[0059] An exemplary method to calculate the increase in endolysosomal delivery of a pH engineered ABPC variant as compared to its corresponding starting ABPC from cellular fluorescence data is to measure the ratio of the variant's mean fluorescence intensity minus the mean fluorescence intensity of a non-binding IgG control, then all divided by the variant's corresponding starting ABPC's mean fluorescence intensity minus the mean fluorescence intensity of the IgG control.

[0060] An exemplary assay for measuring endolysosomal delivery of any of the ABPCs described herein include those which involve labeling of an ABPC with a fluorescent dye, followed by incubation of the labeled ABPC with cells and measurement of cellular fluorescence as an indicator of endolysosomal delivery of the ABPC (e.g., as described generally in Wustner, Traffic 7(6):699-715, 2006). Alternatively, pH-sensitive dyes which preferentially fluoresce at acidic pH but not neutral pH can be used to label any of the ABPCs described herein, which can then be incubated with cells and the cellular fluorescence measured as an indicator of delivery of the ABPC into acidic endolysosomal compartments.

[0061] The term “population” when used before a noun means two or more of the specific noun. For example, the phrase “a population of cancer cells” means “two or more cancer cells.” Non-limiting examples of cancer cells are described herein.

[0062] The phrase “cytostatic to a cell” refers to a direct or indirect decrease in the proliferation (cell division) of the cell (e.g., a cancer cell) in vivo or in vitro. When an agent is cytostatic to a cell, the agent can, e.g., directly or indirectly result in cell cycle arrest of the cell (e.g., a cancer cell). In some examples, an agent that is cytostatic to a cell can reduce the number of cells in a population of the cells that are in S phase (as compared to the number of cells in a population of the cells that are in S phase prior to contact with the agent). In some examples, an agent that is cytostatic to a cell can reduce the percentage of the cells in S phase by at least 20%, at least 40%, at least 60%, or at least 80% (e.g., as compared to the percentage of cells in a population of the cells that are in S phase prior to contact with the agent).

[0063] The phrase “cytotoxic to a cell” refers to the inducement, directly or indirectly, in the death (e.g., necrosis or apoptosis) of the cell (e.g., a mammalian cell, e.g., a cancer cell).

[0064] “Affinity” refers to the strength of the sum total of non-covalent interactions between an antigen-binding site and its binding partner (e.g., an antigen or epitope). Unless indicated otherwise, as used herein, “affinity” refers to intrinsic binding affinity, which reflects a 1:1 interaction between members of an antigen-binding domain and an antigen or epitope. The affinity of a molecule X for its partner Y can be represented by the dissociation equilibrium constant (K_{D}). Affinity can be measured by common methods known in the art, including those described herein. Affinity can be determined, for example, using surface plasmon resonance (SPR) technology (e.g., BIACORE®) or biolayer interferometry (e.g., FORTEBIO®). Additional methods for determining the affinity for an antigen-binding domain and its corresponding antigen or epitope are known in the art.

[0065] The term “epitope” means a portion of an antigen that is specifically bound by an antigen-binding domain through a set of physical interactions between: (i) all monomers (e.g. individual amino acid residues, sugar side chains, and post-translationally modified amino acid residues) on the portion of the antigen-binding domain that specifically binds the antigen and (ii) all monomers (e.g. individual amino acid residues, sugar side chains, post-translationally modified amino acid residues) on the portion of the antigen that is specifically bound by the antigen-binding domain. Epitopes can, e.g., consist of surface-accessible amino acid residues, sugar side chains, phosphorylated amino acid residues, methylated amino acid residues, and/or acetylated amino acid residues and may have specific three-dimensional structural characteristics, as well as specific charge characteristics. Conformational and non-conformational epitopes are distinguished in that binding to the former, but not the latter, may be lost in the presence of denaturing solvents. In some embodiments, an epitope is defined by a linear amino acid sequence of at least about 3 to 6 amino acids, or about 10 to 15 amino acids. In some embodiments, an epitope refers to a portion of a full-length protein or a portion thereof that is defined by a three-dimensional structure (e.g., protein folding). In some embodiments, an epitope is defined by a discontinuous amino acid sequence that is brought together via protein folding. In some embodiments, an epitope is defined by a discontinuous amino acid sequence that is brought together by quaternary structure (e.g., a cleft formed by the interaction of two different polypeptide chains). The amino acid sequences between the residues that define the epitope may not be critical to three-dimensional structure of the epitope. A conformational epitope may be determined and screened using assays that compare binding of antigen-binding protein construct to a denatured version of the antigen, such that a linear epitope is generated. An epitope may include amino acid residues that are directly involved in the binding, and other amino acid residues, which are not directly involved in the binding.

[0066] Methods for identifying an epitope to which an antigen-binding domain specifically binds are known in the art, e.g., structure-based analysis (e.g. X-ray crystallography, NMR, and/or electron microscopy) (e.g. on the antigen and/or the antigen-antigen binding domain complex) and/or mutagenesis-based analysis (e.g. alanine scanning mutagenesis, glycine scanning mutagenesis, and homology scanning mutagenesis) wherein mutants are measured in a binding assay with a binding partner, many of which are known in the art.

[0067] The term “paratope” means a portion of an antigen-binding domain that specifically binds to an antigen through a set of physical interactions between: (i) all monomers (e.g. individual amino acid residues, sugar side chains, posttranslationally modified amino acid residues) on the portion of the antigen-binding domain that specifically binds the antigen and (ii) all monomers (e.g. individual amino acid residues, sugar side chains, posttranslationally modified amino acid residues) on the portion of the antigen that is specifically bound by the antigen-binding domain. Paratopes can, e.g. consist of surface-accessible amino acid residues and may have specific three-dimensional structural characteristics, as well as specific charge characteristics. In some embodiments, a paratope refers to a portion of a full-length antigen-binding domain or a portion thereof that is defined by a three-dimensional structure (e.g., protein folding). In some embodiments, a paratope is defined by a discontinuous amino acid sequence that is brought together via protein folding. In some embodiments, an epitope is defined by a discontinuous amino acid sequence that is brought together by quaternary structure (e.g., a cleft formed by the interaction of two different polypeptide chains). The amino acid sequences between the residues that define the paratope may not be critical to three-dimensional structure of the paratope. A paratope may comprise amino acid residues that are directly involved in the binding, and other amino acid residues, which are not directly involved in the binding.

[0068] Methods for identifying a paratope to which an antigen-binding domain specifically binds are known in the art, e.g., structure-based analysis (e.g., X-ray crystallography, NMR, and/or electron microscopy) (e.g. on the antigen-binding domain, and/or the antigen binding domain-antigen complex), and/or mutagenesis-based analysis (e.g., alanine scanning mutagenesis, glycine scanning mutagenesis, and homology scanning mutagenesis) wherein mutants are measured in a binding assay with a binding partner, many of which are known in the art.

[0069] The phrase “present on the surface of a mammalian cell” means (1) an antigen that physically attached to or at least partially embedded in the plasma membrane of a mammalian cell (e.g., a transmembrane protein, a peripheral membrane protein, a lipid-anchored protein (e.g., a GPI-anchor), an N-myristoylated protein, or a S-palmitoylated protein) or (2) an antigen that is stably bound to its cognate receptor, where the cognate receptor is physically attached to the plasma membrane of a mammalian cell (e.g., a ligand bound to its cognate receptor, where the cognate receptor is physically attached to the plasma membrane). Non-limiting methods for determining the presence of antigen on the surface of a mammalian cell include fluorescence-activated cell sorting (FACS), immunohistochemistry, cell-fractionation assays and Western blotting.

[0070] The phrase “control ABPC” or “control antigen-binding protein construct” means (i) an ABPC that is capable of specifically binding to CD22 or an epitope of CD22 presented on the surface of a mammalian cell (e.g., a target mammalian cell), where one or both of the following is true: (a) the dissociation rate of the first antigen-binding domain at a pH of about 4.0 to about 6.5 (e.g., any of the subranges of this range described herein) is no more than 3-fold (e.g., no more than 2.8-fold, no more than 2.6-fold, no more than 2.5-fold, no more than 2.4-fold, no more than 2.2-fold, no more than 2.0-fold, no more than 1.8-fold, no more than 1.6-fold, no more than 1.5-fold, no more than 1.4-fold, no more than 1.2-fold, no more than 1.0-fold, no more than 0.8-fold, no more than 0.6-fold, no more than 0.5-fold, no more than 0.4-fold, no more than 0.3-fold no more than 0.2-fold, or no more than 0.1-fold) faster than the dissociation rate at a pH of about 7.0 to about 8.0 (e.g., any of the subranges of this range described herein); or (b) the dissociation constant (K_{D}) of the first antigen-binding domain at a pH of about 4.0 to about 6.5 (e.g., any of the subranges of this range described herein) is no more than 3-fold (e.g., no more than 2.8-fold, no more than 2.6-fold, no more than 2.5-fold, no more than 2.4-fold, no more than 2.2-fold, no more than 2.0-fold, no more than 1.8-fold, no more than 1.6-fold, no more than 1.5-fold, no more than 1.4-fold, no more than 1.2-fold, no more than 1.0-fold, no more than 0.8-fold, no more than 0.6-fold, no more than 0.5-fold, no more than 0.4-fold, no more than 0.3-fold no more than 0.2-fold, or no more than 0.1-fold) greater than the K_{D} at a pH of about 7.0 to about 8.0 (e.g., any of the subranges of this range described herein); and/or (ii) pinatuzumab, and/or (iii) inotuzumab and/or (iv) ADCT-602; and/or (v) TRPH-222; and/or (vi) 12C5; and/or (vii) 19A3.

[0071] The term “extracellular space” means the liquid exterior to the plasma membrane of a mammalian cell. When a mammalian cell is in vitro, the extracellular space can be a liquid culture medium. When a mammalian cell is in vivo, the extracellular space can be, e.g., plasma, serum, blood, interstitial fluid, or lymph.

[0072] The term “endolysosomal space” means the fluid encapsulated by the vesicles and organelles that make-up the endosomal/lysosomal pathway in a mammalian cell.

[0073] The phrase “a reduced level” or “a decreased level” can be a reduction or decrease of at least a 1% (e.g., at least 2%, at least 4%, at least 6%, at least 8%, at least 10%, at least 12%, at least 14%, at least 16%, at least 18%, at least 20%, at least 22%, at least 24%, at least 26%, at least 30%, at least 35%, at least 40%, at least 45%, at least 50%, at least 55%, at least 60%, at least 65%, at least 70%, at least 75%, at least 80%, at least 85%, at least 90%, at least 95%, or at least 99%) reduction as compared to a reference level or value.

[0074] The term “cell killing potency” refers to the ability of an agent (e.g., any of the ABPCs described herein) to induce, directly or indirectly, the apoptosis and/or necrosis of a mammalian cell (e.g., a cancer cell), measured as a rate over time or at a relevant timepoint. Methods for determining the cell killing potency of a cell are known in the art (e.g., trypan blue staining, microscopy, fluorescence-assisted cell sorting, and assays to detect markers of apoptosis (e.g., Annexin V)). In non-limiting examples, cell killing potency can be measured, e.g., by cell killing at a single concentration of an agent, by the IC50 of the agent (i.e. the concentration of the agent whereby half the maximal cell killing potency is achieved), or by the ratio of an agent's dissociation constant KD on mammalian cells divided by its IC50. In some non-limiting examples, the IC50s and/or the KD ratios described herein are compared to those of a control ABPC (as defined herein), and, optionally, demonstrate that the ABPCs described herein have a higher cell killing potency as compared to the control ABPC.

[0075] The term “toxin liberation” refers to the ability of a mammalian cell (e.g., a non-cancerous mammalian cell or a cancer cell) to internalize (e.g., via pinocytosis and/or receptor-mediated endocytosis) any of the ABPCs described herein (e.g., any of ABPCs or control ABPCs described herein) that are conjugated to a toxin, and subsequently release the toxin conjugated to the ABPC, measured as a rate over time or at a specific timepoint. Toxin liberation can be assessed using a variety of different exemplary assays, e.g., ELISA, immunofluorescence, cell killing assays, cell cycle arrest assays, DNA damage assays, mass spectrometry, HPLC, and/or an isotope-labeled toxin.

[0076] The phrase “target cell” or “target mammalian cell” or “mammalian target cell” means a mammalian cell that has at least one CD22 present on its surface. In some examples, a mammalian target cell can be a cancer cell. In some embodiments of a target mammalian cell can have a total of about 1 to about 10,000,000, about 1 to about 9,000,000, about 1 to about 8,000,000, about 1 to about 7,000,000, about 1 to about 6,000,000, about 1 to about 5,000,000, about 1 to about 4,000,000, about 1 to about 3,000,000, about 1 to about 2,000,000, about 1 to about 1,000,000, about 1 to about 800,000, about 1 to about 600,000, about 1 to about 400,000, about 1 to about 200,000, about 1 to about 100,000, about 1 to about 80,000, about 1 to about 80,000, about 1 to about 75,000, about 1 to about 70,000, about 1 to about 65,000, about 1 to about 60,000, about 1 to about 55,000, about 1 to about 50,000, about 1 to about 45,000, about 1 to about 40,000, about 1 to about 35,000, about 1 to about 30,000, about 1 to about 25,000, about 1 to about 20,000, about 1 to about 15,000, about 1 to about 10,000, about 1 to about 7,500, about 1 to about 5,000, about 1 to about 4,000, about 1 to about 3,000, about 1 to about 2,000, about 1 to about 1,000, about 1 to about 500, about 1 to about 100, about 1 to about 50, about 1 to about 10, about 10 to about 10,000,000, about 10 to about 9,000,000, about 10 to about 8,000,000, about 10 to about 7,000,000, about 10 to about 6,000,000, about 10 to about 5,000,000, about 10 to about 4,000,000, about 10 to about 3,000,000, about 10 to about 2,000,000, about 10 to about 1,000,000, about 10 to about 800,000, about 10 to about 600,000, about 10 to about 400,000, about 10 to about 200,000, about 10 to about 100,000, about 10 to about 80,000, about 10 to about 80,000, about 10 to about 75,000, about 10 to about 70,000, about 10 to about 65,000, about 10 to about 60,000, about 10 to about 55,000, about 10 to about 50,000, about 10 to about 45,000, about 10 to about 40,000, about 10 to about 35,000, about 10 to about 30,000, about 10 to about 25,000, about 10 to about 20,000, about 10 to about 15,000, about 10 to about 10,000, about 10 to about 7,500, about 10 to about 5,000, about 10 to about 4,000, about 10 to about 3,000, about 10 to about 2,000, about 10 to about 1,000, about 10 to about 500, about 10 to about 100, about 10 to about 50, about 50 to about 10,000,000, about 50 to about 9,000,000, about 50 to about 8,000,000, about 50 to about 7,000,000, about 50 to about 6,000,000, about 50 to about 5,000,000, about 50 to about 4,000,000, about 50 to about 3,000,000, about 50 to about 2,000,000, about 50 to about 1,000,000, about 50 to about 800,000, about 50 to about 600,000, about 50 to about 400,000, about 50 to about 200,000, about 50 to about 100,000, about 50 to about 80,000, about 50 to about 80,000, about 50 to about 75,000, about 50 to about 70,000, about 50 to about 65,000, about 50 to about 60,000, about 50 to about 55,000, about 50 to about 50,000, about 50 to about 45,000, about 50 to about 40,000, about 50 to about 35,000, about 50 to about 30,000, about 50 to about 25,000, about 50 to about 20,000, about 50 to about 15,000, about 50 to about 10,000, about 50 to about 7,500, about 50 to about 5,000, about 50 to about 4,000, about 50 to about 3,000, about 50 to about 2,000, about 50 to about 1,000, about 50 to about 500, about 50 to about 100, about 100 to about 10,000,000, about 100 to about 9,000,000, about 100 to about 8,000,000, about 100 to about 7,000,000, about 100 to about 6,000,000, about 100 to about 5,000,000, about 100 to about 4,000,000, about 100 to about 3,000,000, about 100 to about 2,000,000, about 100 to about 1,000,000, about 100 to about 800,000, about 100 to about 600,000, about 100 to about 400,000, about 100 to about 200,000, about 100 to about 100,000, about 100 to about 80,000, about 100 to about 75,000, about 100 to about 70,000, about 100 to about 65,000, about 100 to about 60,000, about 100 to about 55,000, about 100 to about 50,000, about 100 to about 45,000, about 100 to about 40,000, about 100 to about 35,000, about 100 to about 30,000, about 100 to about 25,000, about 100 to about 20,000, about 100 to about 15,000, about 100 to about 10,000, about 100 to about 7,500, about 100 to about 5,000, about 100 to about 4,000, about 100 to about 3,000, about 100 to about 2,000, about 100 to about 1,000, about 100 to about 500, about 500 to about 10,000,000, about 500 to about 9,000,000, about 500 to about 8,000,000, about 500 to about 7,000,000, about 500 to about 6,000,000, about 500 to about 5,000,000, about 500 to about 4,000,000, about 500 to about 3,000,000, about 500 to about 2,000,000, about 500 to about 1,000,000, about 500 to about 800,000, about 500 to about 600,000, about 500 to about 400,000, about 500 to about 200,000, about 500 to about 100,000, about 500 to about 80,000, about 500 to about 75,000, about 500 to about 70,000, about 500 to about 65,000, about 500 to about 60,000, about 500 to about 55,000, about 500 to about 50,000, about 500 to about 45,000, about 500 to about 40,000, about 500 to about 35,000, about 500 to about 30,000, about 500 to about 25,000, about 500 to about 20,000, about 500 to about 15,000, about 500 to about 10,000, about 500 to about 7,500, about 500 to about 5,000, about 500 to about 4,000, about 500 to about 3,000, about 500 to about 2,000, about 500 to about 1,000, about 1,000 to about 10,000,000, about 1,000 to about 9,000,000, about 1,000 to about 8,000,000, about 1,000 to about 7,000,000, about 1,000 to about 6,000,000, about 1,000 to about 5,000,000, about 1,000 to about 4,000,000, about 1,000 to about 3,000,000, about 1,000 to about 2,000,000, about 1,000 to about 1,000,000, about 1,000 to about 800,000, about 1,000 to about 600,000, about 1,000 to about 400,000, about 1,000 to about 200,000, about 1,000 to about 100,000, about 1,000 to about 80,000, about 1,000 to about 75,000, about 1,000 to about 70,000, about 1,000 to about 65,000, about 1,000 to about 60,000, about 1,000 to about 55,000, about 1,000 to about 50,000, about 1,000 to about 45,000, about 1,000 to about 40,000, about 1,000 to about 35,000, about 1,000 to about 30,000, about 1,000 to about 25,000, about 1,000 to about 20,000, about 1,000 to about 15,000, about 1,000 to about 10,000, about 1,000 to about 7,500, about 1,000 to about 5,000, about 1,000 to about 4,000, about 1,000 to about 3,000, about 1,000 to about 2,000, about 2,000 to about 10,000,000, about 2,000 to about 9,000,000, about 2,000 to about 8,000,000, about 2,000 to about 7,000,000, about 2,000 to about 6,000,000, about 2,000 to about 5,000,000, about 2,000 to about 4,000,000, about 2,000 to about 3,000,000, about 2,000 to about 2,000,000, about 2,000 to about 1,000,000, about 2,000 to about 800,000, about 2,000 to about 600,000, about 2,000 to about 400,000, about 2,000 to about 200,000, about 2,000 to about 100,000, about 2,000 to about 80,000, about 2,000 to about 75,000, about 2,000 to about 70,000, about 2,000 to about 65,000, about 2,000 to about 60,000, about 2,000 to about 55,000, about 2,000 to about 50,000, about 2,000 to about 45,000, about 2,000 to about 40,000, about 2,000 to about 35,000, about 2,000 to about 30,000, about 2,000 to about 25,000, about 2,000 to about 20,000, about 2,000 to about 15,000, about 2,000 to about 10,000, about 2,000 to about 7,500, about 2,000 to about 5,000, about 2,000 to about 4,000, about 2,000 to about 3,000, about 3,000 to about 10,000,000, about 3,000 to about 9,000,000, about 3,000 to about 8,000,000, about 3,000 to about 7,000,000, about 3,000 to about 6,000,000, about 3,000 to about 5,000,000, about 3,000 to about 4,000,000, about 3,000 to about 3,000,000, about 3,000 to about 2,000,000, about 3,000 to about 1,000,000, about 3,000 to about 800,000, about 3,000 to about 600,000, about 3,000 to about 400,000, about 3,000 to about 200,000, about 3,000 to about 100,000, about 3,000 to about 80,000, about 3,000 to about 75,000, about 3,000 to about 70,000, about 3,000 to about 65,000, about 3,000 to about 60,000, about 3,000 to about 55,000, about 3,000 to about 50,000, about 3,000 to about 45,000, about 3,000 to about 40,000, about 3,000 to about 35,000, about 3,000 to about 30,000, about 3,000 to about 25,000, about 3,000 to about 20,000, about 3,000 to about 15,000, about 3,000 to about 10,000, about 3,000 to about 7,500, about 3,000 to about 5,000, about 3,000 to about 4,000, about 4,000 to about 10,000,000, about 4,000 to about 9,000,000, about 4,000 to about 8,000,000, about 4,000 to about 7,000,000, about 4,000 to about 6,000,000, about 4,000 to about 5,000,000, about 4,000 to about 4,000,000, about 4,000 to about 3,000,000, about 4,000 to about 2,000,000, about 4,000 to about 1,000,000, about 4,000 to about 800,000, about 4,000 to about 600,000, about 4,000 to about 400,000, about 4,000 to about 200,000, about 4,000 to about 100,000, about 4,000 to about 80,000, about 4,000 to about 75,000, about 4,000 to about 70,000, about 4,000 to about 65,000, about 4,000 to about 60,000, about 4,000 to about 55,000, about 4,000 to about 50,000, about 4,000 to about 45,000, about 4,000 to about 40,000, about 4,000 to about 35,000, about 4,000 to about 30,000, about 4,000 to about 25,000, about 4,000 to about 20,000, about 4,000 to about 15,000, about 4,000 to about 10,000, about 4,000 to about 7,500, about 4,000 to about 5,000, about 5,000 to about 10,000,000, about 5,000 to about 9,000,000, about 5,000 to about 8,000,000, about 5,000 to about 7,000,000, about 5,000 to about 6,000,000, about 5,000 to about 5,000,000, about 5,000 to about 4,000,000, about 5,000 to about 3,000,000, about 5,000 to about 2,000,000, about 5,000 to about 1,000,000, about 5,000 to about 800,000, about 5,000 to about 600,000, about 5,000 to about 400,000, about 5,000 to about 200,000, about 5,000 to about 100,000, about 5,000 to about 80,000, about 5,000 to about 75,000, about 5,000 to about 70,000, about 5,000 to about 65,000, about 5,000 to about 60,000, about 5,000 to about 55,000, about 5,000 to about 50,000, about 5,000 to about 45,000, about 5,000 to about 40,000, about 5,000 to about 35,000, about 5,000 to about 30,000, about 5,000 to about 25,000, about 5,000 to about 20,000, about 5,000 to about 15,000, about 5,000 to about 10,000, about 5,000 to about 7,500, about 7,500 to about 10,000,000, about 7,500 to about 9,000,000, about 7,500 to about 8,000,000, about 7,500 to about 7,000,000, about 7,500 to about 6,000,000, about 7,500 to about 5,000,000, about 7,500 to about 4,000,000, about 7,500 to about 3,000,000, about 7,500 to about 2,000,000, about 7,500 to about 1,000,000, about 7,500 to about 800,000, about 7,500 to about 600,000, about 7,500 to about 400,000, about 7,500 to about 200,000, about 7,500 to about 100,000, about 7,500 to about 80,000, about 7,500 to about 75,000, about 7,500 to about 70,000, about 7,500 to about 65,000, about 7,500 to about 60,000, about 7,500 to about 55,000, about 7,500 to about 50,000, about 7,500 to about 45,000, about 7,500 to about 40,000, about 7,500 to about 35,000, about 7,500 to about 30,000, about 7,500 to about 25,000, about 7,500 to about 20,000, about 7,500 to about 15,000, about 7,500 to about 10,000, about 10,000 to about 10,000,000, about 10,000 to about 9,000,000, about 10,000 to about 8,000,000, about 10,000 to about 7,000,000, about 10,000 to about 6,000,000, about 10,000 to about 5,000,000, about 10,000 to about 4,000,000, about 10,000 to about 3,000,000, about 10,000 to about 2,000,000, about 10,000 to about 1,000,000, about 10,000 to about 800,000, about 10,000 to about 600,000, about 10,000 to about 400,000, about 10,000 to about 200,000, about 10,000 to about 100,000, about 10,000 to about 80,000, about 10,000 to about 75,000, about 10,000 to about 70,000, about 10,000 to about 65,000, about 10,000 to about 60,000, about 10,000 to about 55,000, about 10,000 to about 50,000, about 10,000 to about 45,000, about 10,000 to about 40,000, about 10,000 to about 35,000, about 10,000 to about 30,000, about 10,000 to about 25,000, about 10,000 to about 20,000, about 10,000 to about 15,000, about 15,000 to about 10,000,000, about 15,000 to about 9,000,000, about 15,000 to about 8,000,000, about 15,000 to about 7,000,000, about 15,000 to about 6,000,000, about 15,000 to about 5,000,000, about 15,000 to about 4,000,000, about 15,000 to about 3,000,000, about 15,000 to about 2,000,000, about 15,000 to about 1,000,000, about 15,000 to about 800,000, about 15,000 to about 600,000, about 15,000 to about 400,000, about 15,000 to about 200,000, about 15,000 to about 100,000, about 15,000 to about 80,000, about 15,000 to about 75,000, about 15,000 to about 70,000, about 15,000 to about 65,000, about 15,000 to about 60,000, about 15,000 to about 55,000, about 15,000 to about 50,000, about 15,000 to about 45,000, about 15,000 to about 40,000, about 15,000 to about 35,000, about 15,000 to about 30,000, about 15,000 to about 25,000, about 15,000 to about 20,000, about 20,000 to about 10,000,000, about 20,000 to about 9,000,000, about 20,000 to about 8,000,000, about 20,000 to about 7,000,000, about 20,000 to about 6,000,000, about 20,000 to about 5,000,000, about 20,000 to about 4,000,000, about 20,000 to about 3,000,000, about 20,000 to about 2,000,000, about 20,000 to about 1,000,000, about 20,000 to about 800,000, about 20,000 to about 600,000, about 20,000 to about 400,000, about 20,000 to about 200,000, about 20,000 to about 100,000, about 20,000 to about 80,000, about 20,000 to about 75,000, about 20,000 to about 70,000, about 20,000 to about 65,000, about 210,000 to about 60,000, about 20,000 to about 55,000, about 20,000 to about 50,000, about 20,000 to about 45,000, about 20,000 to about 40,000, about 20,000 to about 35,000, about 20,000 to about 30,000, about 20,000 to about 25,000, about 25,000 to about 10,000,000, about 25,000 to about 9,000,000, about 25,000 to about 8,000,000, about 25,000 to about 7,000,000, about 25,000 to about 6,000,000, about 25,000 to about 5,000,000, about 25,000 to about 4,000,000, about 25,000 to about 3,000,000, about 25,000 to about 2,000,000, about 25,000 to about 1,000,000, about 25,000 to about 800,000, about 25,000 to about 600,000, about 25,000 to about 400,000, about 25,000 to about 200,000, about 25,000 to about 100,000, about 25,000 to about 80,000, about 25,000 to about 75,000, about 25,000 to about 70,000, about 25,000 to about 65,000, about 25,000 to about 60,000, about 25,000 to about 55,000, about 25,000 to about 50,000, about 25,000 to about 45,000, about 25,000 to about 40,000, about 25,000 to about 35,000, about 25,000 to about 30,000, about 30,000 to about 10,000,000, about 30,000 to about 9,000,000, about 30,000 to about 8,000,000, about 30,000 to about 7,000,000, about 30,000 to about 6,000,000, about 30,000 to about 5,000,000, about 30,000 to about 4,000,000, about 30,000 to about 3,000,000, about 30,000 to about 2,000,000, about 30,000 to about 1,000,000, about 30,000 to about 800,000, about 30,000 to about 600,000, about 30,000 to about 400,000, about 30,000 to about 200,000, about 30,000 to about 100,000, about 30,000 to about 80,000, about 30,000 to about 75,000, about 30,000 to about 70,000, about 30,000 to about 65,000, about 30,000 to about 60,000, about 30,000 to about 55,000, about 30,000 to about 50,000, about 30,000 to about 45,000, about 30,000 to about 40,000, about 30,000 to about 35,000, about 35,000 to about 10,000,000, about 35,000 to about 9,000,000, about 35,000 to about 8,000,000, about 35,000 to about 7,000,000, about 35,000 to about 6,000,000, about 35,000 to about 5,000,000, about 35,000 to about 4,000,000, about 35,000 to about 3,000,000, about 35,000 to about 2,000,000, about 35,000 to about 1,000,000, about 35,000 to about 800,000, about 35,000 to about 600,000, about 35,000 to about 400,000, about 35,000 to about 200,000, about 35,000 to about 100,000, about 35,000 to about 80,000, about 35,000 to about 75,000, about 35,000 to about 70,000, about 35,000 to about 65,000, about 35,000 to about 60,000, about 35,000 to about 55,000, about 35,000 to about 50,000, about 35,000 to about 45,000, about 35,000 to about 40,000, about 40,000 to about 10,000,000, about 40,000 to about 9,000,000, about 40,000 to about 8,000,000, about 40,000 to about 7,000,000, about 40,000 to about 6,000,000, about 40,000 to about 5,000,000, about 40,000 to about 4,000,000, about 40,000 to about 3,000,000, about 40,000 to about 2,000,000, about 40,000 to about 1,000,000, about 40,000 to about 800,000, about 40,000 to about 600,000, about 40,000 to about 400,000, about 40,000 to about 200,000, about 40,000 to about 100,000, about 40,000 to about 80,000, about 40,000 to about 75,000, about 40,000 to about 70,000, about 40,000 to about 65,000, about 40,000 to about 60,000, about 40,000 to about 55,000, about 40,000 to about 50,000, about 40,000 to about 45,000, about 45,000 to about 10,000,000, about 45,000 to about 9,000,000, about 45,000 to about 8,000,000, about 45,000 to about 7,000,000, about 45,000 to about 6,000,000, about 45,000 to about 5,000,000, about 45,000 to about 4,000,000, about 45,000 to about 3,000,000, about 45,000 to about 2,000,000, about 45,000 to about 1,000,000, about 45,000 to about 800,000, about 45,000 to about 600,000, about 45,000 to about 400,000, about 45,000 to about 200,000, about 45,000 to about 100,000, about 45,000 to about 80,000, about 45,000 to about 75,000, about 45,000 to about 70,000, about 45,000 to about 65,000, about 45,000 to about 60,000, about 45,000 to about 55,000, about 45,000 to about 50,000, about 50,000 to about 10,000,000, about 50,000 to about 9,000,000, about 50,000 to about 8,000,000, about 50,000 to about 7,000,000, about 50,000 to about 6,000,000, about 50,000 to about 5,000,000, about 50,000 to about 4,000,000, about 50,000 to about 3,000,000, about 50,000 to about 2,000,000, about 50,000 to about 1,000,000, about 50,000 to about 800,000, about 50,000 to about 600,000, about 50,000 to about 400,000, about 50,000 to about 200,000, about 50,000 to about 100,000, about 50,000 to about 80,000, about 50,000 to about 75,000, about 50,000 to about 70,000, about 50,000 to about 65,000, about 50,000 to about 60,000, about 50,000 to about 55,000, about 55,000 to about 10,000,000, about 55,000 to about 9,000,000, about 55,000 to about 8,000,000, about 55,000 to about 7,000,000, about 55,000 to about 6,000,000, about 55,000 to about 5,000,000, about 55,000 to about 4,000,000, about 55,000 to about 3,000,000, about 55,000 to about 2,000,000, about 55,000 to about 1,000,000, about 55,000 to about 800,000, about 55,000 to about 600,000, about 55,000 to about 400,000, about 55,000 to about 200,000, about 55,000 to about 100,000, about 55,000 to about 80,000, about 55,000 to about 75,000, about 55,000 to about 70,000, about 55,000 to about 65,000, about 55,000 to about 60,000, about 60,000 to about 10,000,000, about 60,000 to about 9,000,000, about 60,000 to about 8,000,000, about 60,000 to about 7,000,000, about 60,000 to about 6,000,000, about 60,000 to about 5,000,000, about 60,000 to about 4,000,000, about 60,000 to about 3,000,000, about 60,000 to about 2,000,000, about 60,000 to about 1,000,000, about 60,000 to about 800,000, about 60,000 to about 600,000, about 60,000 to about 400,000, about 60,000 to about 200,000, about 60,000 to about 100,000, about 60,000 to about 80,000, about 60,000 to about 75,000, about 60,000 to about 70,000, about 60,000 to about 65,000, about 65,000 to about 10,000,000, about 65,000 to about 9,000,000, about 65,000 to about 8,000,000, about 65,000 to about 7,000,000, about 65,000 to about 6,000,000, about 65,000 to about 5,000,000, about 65,000 to about 4,000,000, about 65,000 to about 3,000,000, about 65,000 to about 2,000,000, about 65,000 to about 1,000,000, about 65,000 to about 800,000, about 65,000 to about 600,000, about 65,000 to about 400,000, about 65,000 to about 200,000, about 65,000 to about 100,000, about 65,000 to about 80,000, about 65,000 to about 75,000, about 65,000 to about 70,000, about 70,000 to about 10,000,000, about 70,000 to about 9,000,000, about 70,000 to about 8,000,000, about 70,000 to about 7,000,000, about 70,000 to about 6,000,000, about 70,000 to about 5,000,000, about 70,000 to about 4,000,000, about 70,000 to about 3,000,000, about 70,000 to about 2,000,000, about 70,000 to about 1,000,000, about 70,000 to about 800,000, about 70,000 to about 600,000, about 70,000 to about 400,000, about 70,000 to about 200,000, about 70,000 to about 100,000, about 70,000 to about 90,000, about 70,000 to about 80,000, about 80,000 to about 10,000,000, about 80,000 to about 9,000,000, about 80,000 to about 8,000,000, about 80,000 to about 7,000,000, about 80,000 to about 6,000,000, about 80,000 to about 5,000,000, about 80,000 to about 4,000,000, about 80,000 to about 3,000,000, about 80,000 to about 2,000,000, about 80,000 to about 1,000,000, about 80,000 to about 800,000, about 80,000 to about 600,000, about 80,000 to about 400,000, about 80,000 to about 200,000, about 80,000 to about 100,000, about 80,000 to about 90,000, about 90,000 to about 10,000,000, about 90,000 to about 9,000,000, about 90,000 to about 8,000,000, about 90,000 to about 7,000,000, about 90,000 to about 6,000,000, about 90,000 to about 5,000,000, about 90,000 to about 4,000,000, about 90,000 to about 3,000,000, about 90,000 to about 2,000,000, about 90,000 to about 1,000,000, about 90,000 to about 800,000, about 90,000 to about 600,000, about 90,000 to about 400,000, about 90,000 to about 200,000, about 90,000 to about 100,000, about 100,000 to about 10,000,000, about 100,000 to about 9,000,000, about 100,000 to about 8,000,000, about 100,000 to about 7,000,000, about 100,000 to about 6,000,000, about 100,000 to about 5,000,000, about 100,000 to about 4,000,000, about 100,000 to about 3,000,000, about 100,000 to about 2,000,000, about 100,000 to about 1,000,000, about 100,000 to about 800,000, about 100,000 to about 600,000, about 100,000 to about 400,000, about 100,000 to about 200,000, about 200,000 to about 10,000,000, about 200,000 to about 9,000,000, about 200,000 to about 8,000,000, about 200,000 to about 7,000,000, about 200,000 to about 6,000,000, about 200,000 to about 5,000,000, about 200,000 to about 4,000,000, about 200,000 to about 3,000,000, about 200,000 to about 2,000,000, about 200,000 to about 1,000,000, about 200,000 to about 800,000, about 200,000 to about 600,000, about 200,000 to about 400,000, about 400,000 to about 10,000,000, about 400,000 to about 9,000,000, about 400,000 to about 8,000,000, about 400,000 to about 7,000,000, about 400,000 to about 6,000,000, about 400,000 to about 5,000,000, about 400,000 to about 4,000,000, about 400,000 to about 3,000,000, about 400,000 to about 2,000,000, about 400,000 to about 1,000,000, about 400,000 to about 800,000, about 400,000 to about 600,000, about 600,000 to about 10,000,000, about 600,000 to about 9,000,000, about 600,000 to about 8,000,000, about 600,000 to about 7,000,000, about 600,000 to about 6,000,000, about 600,000 to about 5,000,000, about 600,000 to about 4,000,000, about 600,000 to about 3,000,000, about 600,000 to about 2,000,000, about 600,000 to about 1,000,000, about 600,000 to about 800,000, about 800,000 to about 10,000,000, about 800,000 to about 9,000,000, about 800,000 to about 8,000,000, about 800,000 to about 7,000,000, about 800,000 to about 6,000,000, about 800,000 to about 5,000,000, about 800,000 to about 4,000,000, about 800,000 to about 3,000,000, about 800,000 to about 2,000,000, about 800,000 to about 1,000,000, about 1,000,000 to about 10,000,000, about 1,000,000 to about 9,000,000, about 1,000,000 to about 8,000,000, about 1,000,000 to about 7,000,000, about 1,000,000 to about 6,000,000, about 1,000,000 to about 5,000,000, about 1,000,000 to about 4,000,000, about 1,000,000 to about 3,000,000, about 1,000,000 to about 2,000,000, about 2,000,000 to about 10,000,000, about 2,000,000 to about 9,000,000, about 2,000,000 to about 8,000,000, about 2,000,000 to about 7,000,000, about 2,000,000 to about 6,000,000, about 2,000,000 to about 5,000,000, about 2,000,000 to about 4,000,000, about 2,000,000 to about 3,000,000, about 3,000,000 to about 10,000,000, about 3,000,000 to about 9,000,000, about 3,000,000 to about 8,000,000, about 3,000,000 to about 7,000,000, about 3,000,000 to about 6,000,000, about 3,000,000 to about 5,000,000, about 3,000,000 to about 4,000,000, about 4,000,000 to about 10,000,000, about 4,000,000 to about 9,000,000, about 4,000,000 to about 8,000,000, about 4,000,000 to about 7,000,000, about 4,000,000 to about 6,000,000, about 4,000,000 to about 5,000,000, about 5,000,000 to about 10,000,000, about 5,000,000 to about 9,000,000, about 5,000,000 to about 8,000,000, about 5,000,000 to about 7,000,000, about 5,000,000 to about 6,000,000, about 6,000,000 to about 10,000,000, about 6,000,000 to about 9,000,000, about 6,000,000 to about 8,000,000, about 6,000,000 to about 7,000,000, about 7,000,000 to about 10,000,000, about 7,000,000 to about 9,000,000, about 7,000,000 to about 8,000,000, about 8,000,000 to about 10,000,000, about 8,000,000 to about 9,000,000, or about 9,000,000 to about 10,000,000 of the CD22 on present on the plasma membrane of the target mammalian cell.

[0077] The phrase “antigen density” means the number of CD22 present on the surface of a target mammalian cell or the average number of CD22 on the surface of a population of particular type of target mammalian cells. It can be measured, e.g., using the Quantibright bead kit or radiolabel (e.g., BD Biosciences PE Phycoerythrin Fluorescence Quantitation Kit, catalog #340495).

[0078] The phrase “amino acid substituted with a histidine” means the substitution of an amino acid residue that is not histidine in a reference polypeptide sequence with a histidine. Non-limiting methods for substituting an amino acid residue in a reference polypeptide with a histidine are described herein. Additional methods for substituting an amino acid residue in a reference polypeptide with a histidine are known in the art.

[0079] The phrase “amino acid substituted with an alanine” means the substitution of an amino acid residue that is a histidine in a reference polypeptide sequence with an alanine. Non-limiting methods for substituting a histidine in a reference polypeptide with an alanine are described herein. Additional methods for substituting an histidine in a reference polypeptide with an alanine are known in the art.

[0080] Unless otherwise defined, all technical and scientific terms used herein have the same meaning as commonly understood by one of ordinary skill in the art to which this invention belongs. Methods and materials are described herein for use in the present invention; other, suitable methods and materials known in the art can also be used. The materials, methods, and examples are illustrative only and not intended to be limiting. All publications, patent applications, patents, sequences, database entries, and other references mentioned herein are incorporated by reference in their entirety. In case of conflict, the present specification, including definitions, will control.

[0081] Other features and advantages of the invention will be apparent from the following detailed description and figures, and from the claims.

### BRIEF DESCRIPTION OF DRAWINGS

[0082] FIG. 1: SDS PAGE for INOTUZUMAB histidine scanning and alanine scanning. Expi293 cell culture supernatants post-harvest were loaded on non-reduced SDS PAGE gels to confirm expression of INOTUZUMAB and histidine scanning and alanine scanning variants. Arrows show the corresponding size for an IgG on a non-reduced SDS PAGE gel. MYT0518 is INOTUZUMAB and the rest of the lanes (MYT0519-MYT0557) are INOTUZUMAB heavy chain histidine scanning and alanine scanning variants.

[0083] FIGS. 2a to 2an: Binding of INOTUZUMAB starting ABPC and histidine scanning and alanine scanning variants to CD22 by biolayer interferometry. MYT0518 (INOTUZUMAB) and MYT0519-MYT0557, heavy chain histidine scanning and alanine scanning variants, were captured on anti-human Fc biosensors and associated with CD22 at low pH or high pH, as specified in the figures.

[0084] FIG. 3: SDS PAGE for INOTUZUMAB histidine scanning and alanine scanning. Expi293 cell culture supernatants post-harvest were loaded on non-reduced SDS PAGE gels to confirm expression of INOTUZUMAB and histidine scanning and alanine scanning variants. Arrows show the corresponding size for an IgG on a non-reduced SDS PAGE gel. MYT0518 is INOTUZUMAB and the rest of the lanes (MYT1642-MYT1673) are INOTUZUMAB light chain histidine scanning and alanine scanning variants. Purified mouse IgG was added as a control.

[0085] FIGS. 4a to 4af: Binding of INOTUZUMAB starting ABPC and histidine scanning and alanine scanning variants to CD22 by biolayer interferometry. MYT1642-MYT1673, light chain histidine scanning and alanine scanning variants, were captured on anti-human Fc biosensors and associated with CD22 at low pH or high pH, as specified in the figures.

[0086] FIG. 5: SDS PAGE for INOTUZUMAB histidine scanning and alanine scanning. Expi293 cell culture supernatants post-harvest were loaded on non-reduced SDS PAGE gels to confirm expression of INOTUZUMAB histidine scanning and alanine scanning variants. Arrows show the corresponding size for an IgG on a non-reduced SDS PAGE gel. MYT1621-MYT1640 are INOTUZUMAB heavy chain combinations histidine scanning and alanine scanning variants.

[0087] FIGS. 6a to 6t: Binding of histidine scanning and alanine scanning variants of INOTUZUMAB to CD22 by biolayer interferometry. MYT1621-MYT1640, heavy chain combination histidine scanning and alanine scanning variants, were captured on anti-human Fc biosensors and associated with CD22 at low pH or high pH, as specified in the figures.

[0088] FIG. 7: SDS PAGE for INOTUZUMAB histidine scanning and alanine scanning. Expi293 cell culture supernatants post-harvest were loaded on non-reduced SDS PAGE gels to confirm expression of INOTUZUMAB and histidine scanning and alanine scanning variants. Arrows show the corresponding size for an IgG on a non-reduced SDS PAGE gel. MYT0518 is INOTUZUMAB and the rest of the lanes (MYT0519-MYT0557) are INOTUZUMAB heavy chain histidine scanning and alanine scanning variants.

[0089] FIGS. 8a to 8an: Binding of INOTUZUMAB starting ABPC and histidine scanning and alanine scanning variants to CD22 by biolayer interferometry. MYT0518 (INOTUZUMAB) and MYT0519-MYT0557, heavy chain histidine scanning and alanine scanning variants, were captured on anti-human Fc biosensors and associated with CD22 at pH 7.4. Dissociation was at either pH 7.4 (black trace) or pH 5.4 (grey trace).

[0090] FIG. 9: SDS PAGE for INOTUZUMAB histidine scanning and alanine scanning. Expi293 cell culture supernatants post-harvest were loaded on non-reduced SDS PAGE gels to confirm expression of INOTUZUMAB and histidine scanning and alanine scanning variants. Arrows show the corresponding size for an IgG on a non-reduced SDS PAGE gel. MYT1642-MYT1673 are INOTUZUMAB light chain histidine scanning and alanine scanning variants.

[0091] FIGS. 10a to 10af: Binding of INOTUZUMAB starting ABPC and histidine scanning and alanine scanning variants to CD22 by biolayer interferometry. MYT1642-MYT1673, light chain histidine scanning and alanine scanning variants, were captured on anti-human Fc biosensors and associated with CD22 at low pH or high pH, as specified in the figures.

[0092] FIG. 11: SDS PAGE for INOTUZUMAB histidine scanning and alanine scanning. Expi293 cell culture supernatants post-harvest were loaded on non-reduced SDS PAGE gels to confirm expression of INOTUZUMAB histidine scanning and alanine scanning variants. Arrows show the corresponding size for an IgG on a non-reduced SDS PAGE gel. MYT1621-MYT1640 and MYT4401-MYT4435 are INOTUZUMAB heavy chain combinations histidine scanning and alanine scanning variants.

[0093] FIGS. 12a to 12bc: Binding of histidine scanning and alanine scanning variants of INOTUZUMAB to CD22 by biolayer interferometry. In FIGS. 12a to 12t MYT1621-MYT1640, heavy chain combination histidine scanning and alanine scanning variants, were captured on anti-human Fc biosensors and associated with CD22 at pH 7.4. Dissociation was at either pH 7.4 (black trace) or pH 5.4 (grey trace). In FIGS. 12u to 12bc MYT4401-MYT4435, heavy chain combination histidine scanning and alanine scanning variants, were captured on anti-human Fc biosensors and associated with CD22 at low pH or high pH, as specified in the figures.

[0094] FIG. 13: SDS PAGE for INOTUZUMAB histidine scanning and alanine scanning. Expi293 cell culture supernatants post-harvest were loaded on non-reduced SDS PAGE gels to confirm expression of INOTUZUMAB histidine scanning and alanine scanning variants. Arrows show the corresponding size for an IgG on a non-reduced SDS PAGE gel. MYT4436-MYT4439 are INOTUZUMAB light chain combinations histidine scanning and alanine scanning variants.

[0095] FIGS. 14a to 14d: Binding of histidine scanning and alanine scanning variants of INOTUZUMAB to CD22 by biolayer interferometry. MYT4436-MYT4439, light chain combination histidine scanning and alanine scanning variants, were captured on anti-human Fc biosensors and associated with CD22 at low pH or high pH, as specified in the figures.

[0096] FIG. 15: SDS PAGE for INOTUZUMAB histidine scanning and alanine scanning. Expi293 cell culture supernatants post-harvest were loaded on non-reduced SDS PAGE gels to confirm expression of INOTUZUMAB histidine scanning and alanine scanning variants. Arrows show the corresponding size for an IgG on a non-reduced SDS PAGE gel. MYT4752-MYT4787 are INOTUZUMAB paired heavy and light chain variants, combining light chain histidine and alanine scanning variants or light chain combination histidine scanning and alanine scanning variants with heavy chain histidine and alanine scanning variants or heavy chain combination histidine scanning and alanine scanning variants.

[0097] FIGS. 16a to 16aj: Binding of histidine scanning and alanine scanning variants of INOTUZUMAB to CD22 by biolayer interferometry. MYT4752-MYT4787, paired heavy and light chain variants, combining light chain histidine and alanine scanning variants or light chain combination histidine scanning and alanine scanning variants with heavy chain histidine and alanine scanning variants or heavy chain combination histidine scanning and alanine scanning variants, were captured on anti-human Fc biosensors and associated with CD22 at low pH or high pH, as specified in the figures.

[0098] FIG. 17: SDS PAGE for PINATUZUMAB histidine scanning and alanine scanning. Expi293 cell culture supernatants post-harvest were loaded on non-reduced SDS PAGE gels to confirm expression of PINATUZUMAB and histidine scanning and alanine scanning variants. Arrows show the corresponding size for an IgG on a non-reduced SDS PAGE gel. MYT1293 is PINATUZUMAB and the rest of the lanes (MYT1294-MYT1333) are PINATUZUMAB heavy chain histidine scanning and alanine scanning variants.

[0099] FIGS. 18a to 18ao: Binding of PINATUZUMAB starting ABPC and histidine scanning and alanine scanning variants to CD22 by biolayer interferometry. MYT1293 (PINATUZUMAB) and MYT1294-MYT1333, heavy chain histidine scanning and alanine scanning variants, were captured on anti-human Fc biosensors and associated with CD22 at low pH or high pH, as specified in the figures.

[0100] FIG. 19: SDS PAGE for PINATUZUMAB histidine scanning and alanine scanning. Expi293 cell culture supernatants post-harvest were loaded on non-reduced SDS PAGE gels to confirm expression of PINATUZUMAB and histidine scanning and alanine scanning variants. Arrows show the corresponding size for an IgG on a non-reduced SDS PAGE gel. MYT1293 is PINATUZUMAB and the rest of the lanes (MYT1294-MYT1333) are PINATUZUMAB heavy chain histidine scanning and alanine scanning variants.

[0101] FIGS. 20a to 20ao: Binding of PINATUZUMAB starting ABPC and histidine scanning and alanine scanning variants to CD22 by biolayer interferometry. MYT1293 (PINATUZUMAB) and MYT1294-MYT1333, heavy chain histidine scanning and alanine scanning variants, were captured on anti-human Fc biosensors and associated with CD22 at low pH or high pH, as specified in the figures.

[0102] FIG. 21: SDS PAGE for PINATUZUMAB histidine scanning and alanine scanning. Expi293 cell culture supernatants post-harvest were loaded on non-reduced SDS PAGE gels to confirm expression of PINATUZUMAB and histidine scanning and alanine scanning variants. Arrows show the corresponding size for an IgG on a non-reduced SDS PAGE gel. MYT2690-MYT2721 are PINATUZUMAB light chain histidine scanning and alanine scanning variants.

[0103] FIGS. 22a to 22af: Binding of PINATUZUMAB starting ABPC and histidine scanning and alanine scanning variants to CD22 by biolayer interferometry. MYT2690-MYT2721, light chain histidine scanning and alanine scanning variants, were captured on anti-human Fc biosensors and associated with CD22 at low pH or high pH, as specified in the figures.

[0104] FIG. 23: SDS PAGE for PINATUZUMAB histidine scanning and alanine scanning. Expi293 cell culture supernatants post-harvest were loaded on non-reduced SDS PAGE gels to confirm expression of PINATUZUMAB histidine scanning and alanine scanning variants. Arrows show the corresponding size for an IgG on a non-reduced SDS PAGE gel. MYT2680-MYT2689 and MYT4440-MYT4474 are PINATUZUMAB heavy chain combinations histidine scanning and alanine scanning variants.

[0105] FIGS. 24a to 24as: Binding of histidine scanning and alanine scanning variants of PINATUZUMAB to CD22 by biolayer interferometry. MYT2680-MYT2689 and MYT4440-MYT4474, heavy chain combination histidine scanning and alanine scanning variants, were captured on anti-human Fc biosensors and associated with CD22 at low pH or high pH, as specified in the figures.

[0106] FIG. 25: SDS PAGE for PINATUZUMAB histidine scanning and alanine scanning. Expi293 cell culture supernatants post-harvest were loaded on non-reduced SDS PAGE gels to confirm expression of PINATUZUMAB histidine scanning and alanine scanning variants. Arrows show the corresponding size for an IgG on a non-reduced SDS PAGE gel. MYT4788-MYT4805 are PINATUZUMAB light chain combinations histidine scanning and alanine scanning variants.

[0107] FIGS. 26a to 26r: Binding of histidine scanning and alanine scanning variants of PINATUZUMAB to CD22 by biolayer interferometry. MYT4788-MYT4805, light chain combination histidine scanning and alanine scanning variants, were captured on anti-human Fc biosensors and associated with CD22 at low pH or high pH, as specified in the figures.

[0108] FIG. 27: SDS PAGE for TRPH-222 histidine scanning and alanine scanning. Expi293 cell culture supernatants post-harvest were loaded on non-reduced SDS PAGE gels to confirm expression of TRPH-222 and histidine scanning and alanine scanning variants. Arrows show the corresponding size for an IgG on a non-reduced SDS PAGE gel. MYT2269 is TRPH-222 and the rest of the lanes (MYT2270-MYT2312) are TRPH-222 heavy chain histidine scanning and alanine scanning variants.

[0109] FIGS. 28a to 28ar: Binding of TRPH-222 starting ABPC and histidine scanning and alanine scanning variants to CD22 by biolayer interferometry. MYT2269 (TRPH-222) and MYT2270-MYT2312, heavy chain histidine scanning and alanine scanning variants, were captured on anti-human Fc biosensors and associated with CD22 at low pH or high pH, as specified in the figures.

[0110] FIG. 29: SDS PAGE for TRPH-222 histidine scanning and alanine scanning. Expi293 cell culture supernatants post-harvest were loaded on non-reduced SDS PAGE gels to confirm expression of TRPH-222 and histidine scanning and alanine scanning variants. Arrows show the corresponding size for an IgG on a non-reduced SDS PAGE gel. MYT4043-MYT4069 are TRPH-222 light chain histidine scanning and alanine scanning variants.

[0111] FIGS. 30a to 30aa: Binding of TRPH-222 starting ABPC and histidine scanning and alanine scanning variants to CD22 by biolayer interferometry. MYT4043-MYT4069, light chain histidine scanning and alanine scanning variants, were captured on anti-human Fc biosensors and associated with CD22 at low pH or high pH, as specified in the figures. Some figures show one or more flat curve(s), which represent reference conditions where no antibody was loaded on the sensor.

[0112] FIG. 31: SDS PAGE for TRPH-222 histidine scanning and alanine scanning. Expi293 cell culture supernatants post-harvest were loaded on non-reduced SDS PAGE gels to confirm expression of TRPH-222 histidine scanning and alanine scanning variants. Arrows show the corresponding size for an IgG on a non-reduced SDS PAGE gel. MYT4070-MYT4089 are TRPH-222 heavy chain combinations histidine scanning and alanine scanning variants.

[0113] FIGS. 32a to 32t: Binding of histidine scanning and alanine scanning variants of TRPH-222 to CD22 by biolayer interferometry. MYT4070-MYT4089, heavy chain combination histidine scanning and alanine scanning variants, were captured on anti-human Fc biosensors and associated with CD22 at low pH or high pH, as specified in the figures.

[0114] FIG. 33: SDS PAGE for ADCT-602 histidine scanning and alanine scanning. Expi293 cell culture supernatants post-harvest were loaded on non-reduced SDS PAGE gels to confirm expression of ADCT-602 and histidine scanning and alanine scanning variants. Arrows show the corresponding size for an IgG on a non-reduced SDS PAGE gel. MYT1495 is ADCT-602 and the rest of the lanes MYT1496-MYT1531 are ADCT-602 heavy chain histidine scanning and alanine scanning variants.

[0115] FIGS. 34a to 34aj: Binding of ADCT-602 starting ABPC and histidine scanning and alanine scanning variants to CD22 by biolayer interferometry. MYT1495 (ADCT-602) and MYT1496-MYT1505 and MYT1507-MYT1531, heavy chain histidine scanning and alanine scanning variants, were captured on anti-human Fc biosensors and associated with CD22 at low pH or high pH, as specified in the figures.

[0116] FIG. 35: SDS PAGE for 12C5 histidine scanning and alanine scanning. Expi293 cell culture supernatants post-harvest were loaded on non-reduced SDS PAGE gels to confirm expression of 12C5 and histidine scanning and alanine scanning variants. Arrows show the corresponding size for an IgG on a non-reduced SDS PAGE gel. MYT4613 is 12C5 and the rest of the lanes (MYT4614-MYT4653) are 12C5 heavy chain histidine scanning and alanine scanning variants.

[0117] FIGS. 36a to 36ao: Binding of 12C5 starting ABPC and histidine scanning and alanine scanning variants to CD22 by biolayer interferometry. MYT4613 (12C5) and MYT4614-MYT4653, heavy chain histidine scanning and alanine scanning variants, were captured on anti-human Fc biosensors and associated with CD22 at low pH or high pH, as specified in the figures.

[0118] FIG. 37: SDS PAGE for 12C5 histidine scanning and alanine scanning. Expi293 cell culture supernatants post-harvest were loaded on non-reduced SDS PAGE gels to confirm expression of 12C5 and histidine scanning and alanine scanning variants. Arrows show the corresponding size for an IgG on a non-reduced SDS PAGE gel. MYT4654-MYT4684 are 12C5 light chain histidine scanning and alanine scanning variants.

[0119] FIGS. 38a to 38ae: Binding of 12C5 starting ABPC and histidine scanning and alanine scanning variants to CD22 by biolayer interferometry. MYT4654-MYT4684, light chain histidine scanning and alanine scanning variants, were captured on anti-human Fc biosensors and associated with CD22 at low pH or high pH, as specified in the figures.

[0120] FIG. 39: SDS PAGE for 19A3 histidine scanning and alanine scanning. Expi293 cell culture supernatants post-harvest were loaded on non-reduced SDS PAGE gels to confirm expression of 19A3 and histidine scanning and alanine scanning variants. Arrows show the corresponding size for an IgG on a non-reduced SDS PAGE gel. MYT4685 is 19A3 and the rest of the lanes (MYT4686-MYT4725 and MYT4808-MYT4812) are 19A3 heavy chain histidine scanning and alanine scanning variants.

[0121] FIGS. 40a to 40at: Binding of 19A3 starting ABPC and histidine scanning and alanine scanning variants to CD22 by biolayer interferometry. MYT4685 (19A3) and MYT4686-MYT4725 and MYT4808-MYT4812, heavy chain histidine scanning and alanine scanning variants, were captured on anti-human Fc biosensors and associated with CD22 at low pH or high pH, as specified in the figures.

[0122] FIG. 41: SDS PAGE for 19A3 histidine scanning and alanine scanning. Expi293 cell culture supernatants post-harvest were loaded on non-reduced SDS PAGE gels to confirm expression of 19A3 and histidine scanning and alanine scanning variants. Arrows show the corresponding size for an IgG on a non-reduced SDS PAGE gel. MYT4726-MYT4751 are 19A3 light chain histidine scanning and alanine scanning variants.

[0123] FIGS. 42a to 42z: Binding of 19A3 starting ABPC and histidine scanning and alanine scanning variants to CD22 by biolayer interferometry. MYT4726-MYT4751, light chain histidine scanning and alanine scanning variants, were captured on anti-human Fc biosensors and associated with CD22 at low pH or high pH, as specified in the figures.

[0124] FIG. 43: Construct identifier to SEQ ID NO correspondence table. Constructs, heavy chain histidine scanning and alanine scanning variants, are listed in the first column of the table, SEQ ID NOs are listed and correspond to constructs on the left and the appropriate heavy chain and/or light chain categories along the top.

[0125] FIG. 44: Construct identifier to SEQ ID NO correspondence table. Constructs, light chain histidine scanning and alanine scanning variants, are listed in the first column of the table, SEQ ID NOs are listed and correspond to constructs on the left and the appropriate heavy chain and/or light chain categories along the top.

[0126] FIG. 45: Construct identifier to SEQ ID NO correspondence table. Constructs, heavy chain combinations histidine scanning and alanine scanning variants, are listed in the first column of the table, SEQ ID NOs are listed and correspond to constructs on the left and the appropriate heavy chain and/or light chain categories along the top.

[0127] FIG. 46: Construct identifier to SEQ ID NO correspondence table. Constructs, light chain combinations histidine scanning and alanine scanning variants, are listed in the first column of the table, SEQ ID NOs are listed and correspond to constructs on the left and the appropriate heavy chain and/or light chain categories along the top.

[0128] FIG. 47: Construct identifier to SEQ ID NO correspondence table. Constructs, paired heavy and light chain variants, combining light chain histidine and alanine scanning variants or light chain combination histidine scanning and alanine scanning variants with heavy chain histidine and alanine scanning variants or heavy chain combination histidine scanning and alanine scanning variants, are listed in the first column of the table, SEQ ID NOs are listed and correspond to constructs on the left and the appropriate heavy chain and/or light chain categories along the top.

[0129] FIG. 48: Construct identifier to SEQ ID NO correspondence table. Constructs, heavy chain histidine scanning and alanine scanning variants, are listed in the first column of the table, SEQ ID NOs are listed and correspond to constructs on the left and the appropriate heavy chain and/or light chain categories along the top.

[0130] FIG. 49: Construct identifier to SEQ ID NO correspondence table. Constructs, light chain histidine scanning and alanine scanning variants, are listed in the first column of the table, SEQ ID NOs are listed and correspond to constructs on the left and the appropriate heavy chain and/or light chain categories along the top.

[0131] FIG. 50: Construct identifier to SEQ ID NO correspondence table. Constructs, heavy chain combinations histidine scanning and alanine scanning variants, are listed in the first column of the table, SEQ ID NOs are listed and correspond to constructs on the left and the appropriate heavy chain and/or light chain categories along the top.

[0132] FIG. 51: Construct identifier to SEQ ID NO correspondence table. Constructs, paired heavy and light chain variants, combining light chain histidine and alanine scanning variants with heavy chain histidine and alanine scanning variants or heavy chain combination histidine scanning and alanine scanning variants, are listed in the first column of the table, SEQ ID NOs are listed and correspond to constructs on the left and the appropriate heavy chain and/or light chain categories along the top.

[0133] FIG. 52: Construct identifier to SEQ ID NO correspondence table. Constructs, heavy chain histidine scanning and alanine scanning variants, are listed in the first column of the table, SEQ ID NOs are listed and correspond to constructs on the left and the appropriate heavy chain and/or light chain categories along the top.

[0134] FIG. 53: Construct identifier to SEQ ID NO correspondence table. Constructs, light chain histidine scanning and alanine scanning variants, are listed in the first column of the table, SEQ ID NOs are listed and correspond to constructs on the left and the appropriate heavy chain and/or light chain categories along the top.

[0135] FIG. 54: Construct identifier to SEQ ID NO correspondence table. Constructs, heavy chain combinations histidine scanning and alanine scanning variants, are listed in the first column of the table, SEQ ID NOs are listed and correspond to constructs on the left and the appropriate heavy chain and/or light chain categories along the top.

[0136] FIG. 55: Construct identifier to SEQ ID NO correspondence table. Constructs, heavy chain histidine scanning and alanine scanning variants, are listed in the first column of the table, SEQ ID NOs are listed and correspond to constructs on the left and the appropriate heavy chain and/or light chain categories along the top.

[0137] FIG. 56: Construct identifier to SEQ ID NO correspondence table. Constructs, heavy chain histidine scanning and alanine scanning variants, are listed in the first column of the table, SEQ ID NOs are listed and correspond to constructs on the left and the appropriate heavy chain and/or light chain categories along the top.

[0138] FIG. 57: Construct identifier to SEQ ID NO correspondence table. Constructs, light chain histidine scanning and alanine scanning variants, are listed in the first column of the table, SEQ ID NOs are listed and correspond to constructs on the left and the appropriate heavy chain and/or light chain categories along the top.

[0139] FIG. 58: Construct identifier to SEQ ID NO correspondence table. Constructs, heavy chain histidine scanning and alanine scanning variants, are listed in the first column of the table, SEQ ID NOs are listed and correspond to constructs on the left and the appropriate heavy chain and/or light chain categories along the top.

[0140] FIG. 59: Construct identifier to SEQ ID NO correspondence table. Constructs, light chain histidine scanning and alanine scanning variants, are listed in the first column of the table, SEQ ID NOs are listed and correspond to constructs on the left and the appropriate heavy chain and/or light chain categories along the top.

[0141] FIGS. 60a-60i: Internalization of anti-CD22 mAbs in Ramos cells. Anti-CD22 pH engineered antibody variants, corresponding starting ABPC antibodies, control IgG1 isotype control (BP0297, Bioxcell), along with a vehicle control, as specified in FIGS. 60a-60i were assayed for internalization and endolysosomal delivery as measured by mean fluorescence intensity on Ramos cells at 24 hours. Error bars represent standard deviation. Numbers above the bars represent fold change over the corresponding starting ABPC.

[0142] FIGS. 61a-61d: Internalization of anti-CD22 mAbs in CD22+ cells. Anti-CD22 pH engineered antibody variants, corresponding starting ABPC antibodies, control IgG1 isotype control (BP0297, Bioxcell), along with a vehicle control, as specified in FIGS. 61a-61d were assayed for internalization and endolysosomal delivery as measured by mean fluorescence intensity on CD22+ cells as specified in the figures at 24 hours. Error bars represent standard deviation. Numbers above the bars represent fold change over the corresponding starting ABPC.

[0143] FIGS. 62a-62b: Surface expression of CD22. FIG. 62a shows CD22 antibodies bound per cell for various cells lines as specified in the figure. Calculations were done using Quantibrite Beads (BD Biosciences) according to the manufacturer. FIG. 62b shows the correlation between internalization of MYT1293 (pinatuzumab) from example 31 and cell surface expression of CD22 from example 32.

[0144] FIGS. 63a-63e: Characterization of binding affinity for anti-CD22 mAbs. Anti-CD22 mAbs were assayed for their binding to Ramos (CD22+) cells. FIG. 64a shows MYT0518 (inotuzumab) with an IC50 of 0.075 nM, FIG. 64b shows MYT4405 with an IC50 of 0.240 nM, FIG. 64c shows MYT4424 with an IC50 of 0.115 nM, FIG. 64d shows MYT1293 (pinatuzumab) with an IC50 of 0.362 nM, FIG. 64e shows MYT1331 with an IC50 of 0.395 nM.

### DETAILED DESCRIPTION

[0145] Provided herein are antigen-binding protein constructs (ABPCs) that include: a first antigen-binding domain that is capable of specifically binding CD22 or an epitope of CD22 presented on the surface of a target mammalian cell, where: (a) the dissociation rate of the first antigen-binding domain at a pH of about 4.0 to about 6.5 is faster than the dissociation rate at a pH of about 7.0 to about 8.0; and/or (b) the dissociation constant (K_{D}) of the first antigen-binding domain at a pH of about 4.0 to about 6.5 is greater than the K_{D} at a pH of about 7.0 to about 8.0. In some examples of these ABPCs, the ABPC is degraded in the target mammalian cell following internalization of the ABPC by the target mammalian cell. Some examples of any of the ABPCs described herein can further include a conjugated toxin, radioisotope, drug, or small molecule (e.g., a fluorophore or dye).

[0146] Also provided are antigen-binding protein constructs (ABPCs) that include: a first antigen-binding domain that is capable of specifically binding CD22 or an epitope of CD22 presented on the surface of a target mammalian cell; and a conjugated toxin, radioisotope, drug, or small molecule, where: (a) the dissociation rate of the first antigen-binding domain at a pH of about 4.0 to about 6.5 is faster than the dissociation rate at a pH of about 7.0 to about 8.0; and/or the dissociation constant (K_{D}) of the first antigen-binding domain at a pH of about 4.0 to about 6.5 is greater than the K_{D} at a pH of about 7.0 to about 8.0; and (b) a composition including the ABPC provides for one or more (e.g., two or three) of: an increase (e.g., a detectable increase) in toxin liberation in the target mammalian cell as compared to a composition comprising the same amount of a control ABPC; an increase (e.g., a detectable increase) in target mammalian cell killing as compared to a composition comprising the same amount of a control ABPC; and an increase (e.g., a detectable increase) in endolysosomal delivery in the target mammalian cell as compared to a composition comprising the same amount of a control ABPC.

[0147] In some examples of any of the ABPCs described herein, the first antigen-binding domain includes a heavy chain variable domain of inotuzumab with one or more (e.g., one, two, three, four, five, six, seven, eight, nine, ten, eleven, twelve, thirteen, fourteen, fifteen, sixteen, seventeen, eighteen, nineteen, or twenty) amino acids substituted with a histidine. In some examples of any of the ABPCs described herein, the first antigen-binding domain includes a light chain variable domain of inotuzumab with one or more (e.g., one, two, three, four, five, six, seven, eight, nine, ten, eleven, twelve, thirteen, fourteen, fifteen, sixteen, seventeen, eighteen, nineteen, or twenty) amino acids substituted with a histidine. In some examples of any of the ABPCs described herein, the first antigen-binding domain includes a heavy chain variable domain of inotuzumab with one or more (e.g., one, two, three, four, five, six, seven, eight, nine, ten, eleven, twelve, thirteen, fourteen, fifteen, sixteen, seventeen, eighteen, nineteen, or twenty) amino acids substituted with a histidine; and a light chain variable domain of inotuzumab with one or more (e.g., one, two, three, four, five, six, seven, eight, nine, ten, eleven, twelve, thirteen, fourteen, fifteen, sixteen, seventeen, eighteen, nineteen, or twenty) amino acids substituted with a histidine. In some examples of any of the ABPCs described herein, the heavy chain variable domain of inotuzumab comprises SEQ ID NO: 1. In some examples of any of the ABPCs described herein, the light chain variable domain of inotuzumab comprises SEQ ID NO: 2.

[0148] In some examples of any of the ABPCs described herein, the first antigen-binding domain comprises a heavy chain variable domain comprising a CDR1, a CDR2, and a CDR3 of SEQ ID NO: 3, SEQ ID NO: 4, and SEQ ID NO: 5, respectively, with collectively a total of one or more (e.g., one, two, three, four, five, six, seven, eight, nine, or ten) amino acid positions in SEQ ID NOs: 3-5 substituted with a histidine. In some examples of any of the ABPCs described herein, the first antigen-binding domain comprises a light chain variable domain comprising a CDR1, a CDR2, and a CDR3 of SEQ ID NO: 6, SEQ ID NO: 7, and SEQ ID NO: 8, respectively, with collectively a total of one or more (e.g., one, two, three, four, five, six, seven, eight, nine, or ten) amino acid positions in SEQ ID NOs: 6-8 substituted with a histidine. In some examples of any of the ABPCs described herein, the first antigen-binding domain includes: a heavy chain variable domain comprising a CDR1, a CDR2, and a CDR3 of SEQ ID NO: 3, SEQ ID NO: 4, and SEQ ID NO: 5, respectively, with collectively a total of one or more (e.g., one, two, three, four, five, six, seven, eight, nine, or ten) amino acid positions in SEQ ID NOs: 3-5 substituted with a histidine; and a light chain variable domain comprising a CDR1, a CDR2, and a CDR3 of SEQ ID NO: 6, SEQ ID NO: 7, and SEQ ID NO: 8, respectively, with collectively a total of one or more (e.g., one, two, three, four, five, six, seven, eight, nine, or ten) amino acid positions in SEQ ID NOs: 6-8 substituted with a histidine.

[0149] In some examples of any of the ABPCs described herein, the first antigen-binding domain includes a heavy chain variable domain that is at least 90% (e.g., at least 92%, at least 94%, at least 96%, at least 98%, at least 99%, or 100%) identical to SEQ ID NO: 1, where the heavy chain variable domain includes a histidine at one or more (e.g., one, two, three, four, five, six, seven, eight, nine, ten, eleven, twelve, thirteen, fourteen, fifteen, sixteen, seventeen, eighteen, nineteen, or twenty) amino acid positions in SEQ ID NO: 1 selected from the group consisting of: 27, 28, 31, 32, 33, 34, 50, 51, 52, 53, 55, 57, 59, 63, 97, 103, 104, and 110. In some examples of any of the ABPCs described herein, the first antigen-binding domain includes a light chain variable domain that is at least 90% (e.g., at least 92%, at least 94%, at least 96%, at least 98%, at least 99%, or 100%) identical to SEQ ID NO: 2, where the light chain variable domain includes a histidine at one or more (e.g., one, two, three, four, five, six, seven, eight, nine, ten, eleven, twelve, thirteen, fourteen, fifteen, sixteen, seventeen, eighteen, nineteen, or twenty) amino acid positions in SEQ ID NO: 2 selected from the group consisting of: 25, 26, 28, 29, 30, 33, 34, 35, 36, 37, 38, 39, 56, 95, and 97. In some examples of any of the ABPCs described herein the first antigen-binding domain includes: a heavy chain variable domain that is at least 90% (e.g., at least 92%, at least 94%, at least 96%, at least 98%, at least 99%, or 100%) identical to SEQ ID NO: 1, where the heavy chain variable domain includes a histidine at one or more (e.g., one, two, three, four, five, six, seven, eight, nine, ten, eleven, twelve, thirteen, fourteen, fifteen, sixteen, seventeen, eighteen, nineteen, or twenty) amino acid positions in SEQ ID NO: 1 selected from the group consisting of: 27, 28, 31, 32, 33, 34, 50, 51, 52, 53, 55, 57, 59, 63, 97, 103, 104, and 110, and a light chain variable domain that is at least 90% (e.g., at least 92%, at least 94%, at least 96%, at least 98%, at least 99%, or 100%) identical to SEQ ID NO: 2, where the light chain variable domain includes a histidine at one or more (e.g., one, two, three, four, five, six, seven, eight, nine, ten, eleven, twelve, thirteen, fourteen, fifteen, sixteen, seventeen, eighteen, nineteen, or twenty) amino acid positions in SEQ ID NO: 2 selected from the group consisting of: 25, 26, 28, 29, 30, 33, 34, 35, 36, 37, 38, 39, 56, 95, and 97.

[0150] In some examples of any of the ABPCs described herein, the first antigen-binding domain includes a heavy chain variable domain that is at least 90% (e.g., at least 92%, at least 94%, at least 96%, at least 98%, at least 99%, or 100%) identical to SEQ ID NO: 1, where the heavy chain variable domain includes an alanine at position 35 in SEQ ID NO: 1.

[0151] In some examples of any of the ABPCs described herein the first antigen-binding domain includes: a heavy chain variable domain that is at least 90% (e.g., at least 92%, at least 94%, at least 96%, at least 98%, at least 99%, or 100%) identical to SEQ ID NO: 1, where the heavy chain variable domain includes an alanine at position 35 in SEQ ID NO: 1, and a light chain variable domain that is at least 90% (e.g., at least 92%, at least 94%, at least 96%, at least 98%, at least 99%, or 100%) identical to SEQ ID NO: 2, where the light chain variable domain includes a histidine at one or more (e.g., one, two, three, four, five, six, seven, eight, nine, ten, eleven, twelve, thirteen, fourteen, fifteen, sixteen, seventeen, eighteen, nineteen, or twenty) amino acid positions in SEQ ID NO: 2 selected from the group consisting of: 25, 26, 28, 29, 30, 33, 34, 35, 36, 37, 38, 39, 56, 95, and 97.

[0152] In some examples of any of the ABPCs described herein, the first antigen-binding domain includes a heavy chain variable domain that is at least 90% (e.g., at least 92%, at least 94%, at least 96%, at least 98%, at least 99%, or 100%) identical to SEQ ID NO: 1, where the heavy chain variable domain includes a histidine at one or more (e.g., one, two, three, four, five, six, seven, eight, nine, ten, eleven, twelve, thirteen, fourteen, fifteen, sixteen, seventeen, eighteen, nineteen, or twenty) amino acid positions in SEQ ID NO: 1 selected from the group consisting of: 27, 28, 31, 32, 33, 34, 50, 51, 52, 53, 55, 57, 59, 63, 97, 103, 104, and 110, and where the heavy chain variable domain includes an alanine at position 35 in SEQ ID NO: 1. In some examples of any of the ABPCs described herein the first antigen-binding domain includes: a heavy chain variable domain that is at least 90% (e.g., at least 92%, at least 94%, at least 96%, at least 98%, at least 99%, or 100%) identical to SEQ ID NO: 1, where the heavy chain variable domain includes a histidine at one or more (e.g., one, two, three, four, five, six, seven, eight, nine, ten, eleven, twelve, thirteen, fourteen, fifteen, sixteen, seventeen, eighteen, nineteen, or twenty) amino acid positions in SEQ ID NO: 1 selected from the group consisting of: 27, 28, 31, 32, 33, 34, 50, 51, 52, 53, 55, 57, 59, 63, 97, 103, 104, and 110, and where the heavy chain variable domain includes an alanine at position 35 in SEQ ID NO: 1, and a light chain variable domain that is at least 90% (e.g., at least 92%, at least 94%, at least 96%, at least 98%, at least 99%, or 100%) identical to SEQ ID NO: 2, where the light chain variable domain includes a histidine at one or more (e.g., one, two, three, four, five, six, seven, eight, nine, ten, eleven, twelve, thirteen, fourteen, fifteen, sixteen, seventeen, eighteen, nineteen, or twenty) amino acid positions in SEQ ID NO: 2 selected from the group consisting of: 25, 26, 28, 29, 30, 33, 34, 35, 36, 37, 38, 39, 56, 95, and 97.

[0153] In some examples of any of the ABPCs described herein, a heavy chain variable domain includes a heavy chain variable domain that is at least 90% (e.g., at least 92%, at least 94%, at least 96%, at least 98%, at least 99%, or 100%) identical to SEQ ID NO: 1, where the heavy chain variable domain includes a histidine at any of the specific combinations of one or more amino acid positions in SEQ ID NO: 1 listed in Table 1.

TABLE 1
Exemplary Combinations of Amino Acid Positions in
SEQ ID NO: 1 that can be Substituted with Histidine

27 + 28, 27 + 31, 27 + 32, 27 + 33, 27 + 34, 27 + 50, 27 + 51, 27 + 52, 27 + 53, 27 + 55, 27 +
57, 27 + 59, 27 + 63, 27 + 97, 27 + 103, 27 + 104, 27 + 110, 28 + 31, 28 + 32, 28 + 33,
28 + 34, 28 + 50, 28 + 51, 28 + 52, 28 + 53, 28 + 55, 28 + 57, 28 + 59, 28 + 63, 28 + 97, 28 +
103, 28 + 104, 28 + 110, 31 + 32, 31 + 33, 31 + 34, 31 + 50, 31 + 51, 31 + 52, 31 + 53,
31 + 55, 31 + 57, 31 + 59, 31 + 63, 31 + 97, 31 + 103, 31 + 104, 31 + 110, 32 + 33, 32 +
34, 32 + 50, 32 + 51, 32 + 52, 32 + 53, 32 + 55, 32 + 57, 32 + 59, 32 + 63, 32 + 97, 32 +
103, 32 + 104, 32 + 110, 33 + 34, 33 + 50, 33 + 51, 33 + 52, 33 + 53, 33 + 55, 33 + 57, 33 +
59, 33 + 63, 33 + 97, 33 + 103, 33 + 104, 33 + 110, 34 + 50, 34 + 51, 34 + 52, 34 + 53,
34 + 55, 34 + 57, 34 + 59, 34 + 63, 34 + 97, 34 + 103, 34 + 104, 34 + 110, 50 + 51, 50 +
52, 50 + 53, 50 + 55, 50 + 57, 50 + 59, 50 + 63, 50 + 97, 50 + 103, 50 + 104, 50 + 110, 51 +
52, 51 + 53, 51 + 55, 51 + 57, 51 + 59, 51 + 63, 51 + 97, 51 + 103, 51 + 104, 51 + 110,
52 + 53, 52 + 55, 52 + 57, 52 + 59, 52 + 63, 52 + 97, 52 + 103, 52 + 104, 52 + 110, 53 +
55, 53 + 57, 53 + 59, 53 + 63, 53 + 97, 53 + 103, 53 + 104, 53 + 110, 55 + 57, 55 + 59, 55 +
63, 55 + 97, 55 + 103, 55 + 104, 55 + 110, 57 + 59, 57 + 63, 57 + 97, 57 + 103, 57 + 104,
57 + 110, 59 + 63, 59 + 97, 59 + 103, 59 + 104, 59 + 110, 63 + 97, 63 + 103, 63 + 104, 63 +
110, 97 + 103, 97 + 104, 97 + 110, 103 + 104, 103 + 110, 104 + 110, 27 + 28 + 31, 27 +
28 + 32, 27 + 28 + 33, 27 + 28 + 34, 27 + 28 + 50, 27 + 28 + 51, 27 + 28 + 52, 27 + 28 +
53, 27 + 28 + 55, 27 + 28 + 57, 27 + 28 + 59, 27 + 28 + 63, 27 + 28 + 97, 27 + 28 + 103,
27 + 28 + 104, 27 + 28 + 110, 27 + 31 + 32, 27 + 31 + 33, 27 + 31 + 34, 27 + 31 + 50, 27 +
31 + 51, 27 + 31 + 52, 27 + 31 + 53, 27 + 31 + 55, 27 + 31 + 57, 27 + 31 + 59, 27 + 31 +
63, 27 + 31 + 97, 27 + 31 + 103, 27 + 31 + 104, 27 + 31 + 110, 27 + 32 + 33, 27 + 32 + 34,
27 + 32 + 50, 27 + 32 + 51, 27 + 32 + 52, 27 + 32 + 53, 27 + 32 + 55, 27 + 32 + 57, 27 +
32 + 59, 27 + 32 + 63, 27 + 32 + 97, 27 + 32 + 103, 27 + 32 + 104, 27 + 32 + 110, 27 + 33 +
34, 27 + 33 + 50, 27 + 33 + 51, 27 + 33 + 52, 27 + 33 + 53, 27 + 33 + 55, 27 + 33 + 57,
27 + 33 + 59, 27 + 33 + 63, 27 + 33 + 97, 27 + 33 + 103, 27 + 33 + 104, 27 + 33 + 110, 27 +
34 + 50, 27 + 34 + 51, 27 + 34 + 52, 27 + 34 + 53, 27 + 34 + 55, 27 + 34 + 57, 27 + 34 +
59, 27 + 34 + 63, 27 + 34 + 97, 27 + 34 + 103, 27 + 34 + 104, 27 + 34 + 110, 27 + 50 + 51,
27 + 50 + 52, 27 + 50 + 53, 27 + 50 + 55, 27 + 50 + 57, 27 + 50 + 59, 27 + 50 + 63, 27 +
50 + 97, 27 + 50 + 103, 27 + 50 + 104, 27 + 50 + 110, 27 + 51 + 52, 27 + 51 + 53, 27 + 51 +
55, 27 + 51 + 57, 27 + 51 + 59, 27 + 51 + 63, 27 + 51 + 97, 27 + 51 + 103, 27 + 51 +
104, 27 + 51 + 110, 27 + 52 + 53, 27 + 52 + 55, 27 + 52 + 57, 27 + 52 + 59, 27 + 52 + 63,
27 + 52 + 97, 27 + 52 + 103, 27 + 52 + 104, 27 + 52 + 110, 27 + 53 + 55, 27 + 53 + 57, 27 +
53 + 59, 27 + 53 + 63, 27 + 53 + 97, 27 + 53 + 103, 27 + 53 + 104, 27 + 53 + 110, 27 +
55 + 57, 27 + 55 + 59, 27 + 55 + 63, 27 + 55 + 97, 27 + 55 + 103, 27 + 55 + 104, 27 + 55 +
110, 27 + 57 + 59, 27 + 57 + 63, 27 + 57 + 97, 27 + 57 + 103, 27 + 57 + 104, 27 + 57 +
110, 27 + 59 + 63, 27 + 59 + 97, 27 + 59 + 103, 27 + 59 + 104, 27 + 59 + 110, 27 + 63 +
97, 27 + 63 + 103, 27 + 63 + 104, 27 + 63 + 110, 27 + 97 + 103, 27 + 97 + 104, 27 + 97 +
110, 27 + 103 + 104, 27 + 103 + 110, 27 + 104 + 110, 28 + 31 + 32, 28 + 31 + 33, 28 + 31 +
34, 28 + 31 + 50, 28 + 31 + 51, 28 + 31 + 52, 28 + 31 + 53, 28 + 31 + 55, 28 + 31 + 57,
28 + 31 + 59, 28 + 31 + 63, 28 + 31 + 97, 28 + 31 + 103, 28 + 31 + 104, 28 + 31 + 110, 28
+ 32 + 33, 28 + 32 + 34, 28 + 32 + 50, 28 + 32 + 51, 28 + 32 + 52, 28 + 32 + 53, 28 + 32 +
55, 28 + 32 + 57, 28 + 32 + 59, 28 + 32 + 63, 28 + 32 + 97, 28 + 32 + 103, 28 + 32 + 104,
28 + 32 + 110, 28 + 33 + 34, 28 + 33 + 50, 28 + 33 + 51, 28 + 33 + 52, 28 + 33 + 53, 28 +
33 + 55, 28 + 33 + 57, 28 + 33 + 59, 28 + 33 + 63, 28 + 33 + 97, 28 + 33 + 103, 28 + 33 +
104, 28 + 33 + 110, 28 + 34 + 50, 28 + 34 + 51, 28 + 34 + 52, 28 + 34 + 53, 28 + 34 + 55,
28 + 34 + 57, 28 + 34 + 59, 28 + 34 + 63, 28 + 34 + 97, 28 + 34 + 103, 28 + 34 + 104, 28 +
34 + 110, 28 + 50 + 51, 28 + 50 + 52, 28 + 50 + 53, 28 + 50 + 55, 28 + 50 + 57, 28 + 50 +
59, 28 + 50 + 63, 28 + 50 + 97, 28 + 50 + 103, 28 + 50 + 104, 28 + 50 + 110, 28 + 51 + 52,
28 + 51 + 53, 28 + 51 + 55, 28 + 51 + 57, 28 + 51 + 59, 28 + 51 + 63, 28 + 51 + 97, 28 +
51 + 103, 28 + 51 + 104, 28 + 51 + 110, 28 + 52 + 53, 28 + 52 + 55, 28 + 52 + 57, 28 + 52 +
59, 28 + 52 + 63, 28 + 52 + 97, 28 + 52 + 103, 28 + 52 + 104, 28 + 52 + 110, 28 + 53 +
55, 28 + 53 + 57, 28 + 53 + 59, 28 + 53 + 63, 28 + 53 + 97, 28 + 53 + 103, 28 + 53 + 104,
28 + 53 + 110, 28 + 55 + 57, 28 + 55 + 59, 28 + 55 + 63, 28 + 55 + 97, 28 + 55 + 103, 28 +
55 + 104, 28 + 55 + 110, 28 + 57 + 59, 28 + 57 + 63, 28 + 57 + 97, 28 + 57 + 103, 28 + 57 +
104, 28 + 57 + 110, 28 + 59 + 63, 28 + 59 + 97, 28 + 59 + 103, 28 + 59 + 104, 28 + 59 +
110, 28 + 63 + 97, 28 + 63 + 103, 28 + 63 + 104, 28 + 63 + 110, 28 + 97 + 103, 28 + 97 +
104, 28 + 97 + 110, 28 + 103 + 104, 28 + 103 + 110, 28 + 104 + 110, 31 + 32 + 33, 31 +
32 + 34, 31 + 32 + 50, 31 + 32 + 51, 31 + 32 + 52, 31 + 32 + 53, 31 + 32 + 55, 31 + 32 +
57, 31 + 32 + 59, 31 + 32 + 63, 31 + 32 + 97, 31 + 32 + 103, 31 + 32 + 104, 31 + 32 + 110,
31 + 33 + 34, 31 + 33 + 50, 31 + 33 + 51, 31 + 33 + 52, 31 + 33 + 53, 31 + 33 + 55, 31 +
33 + 57, 31 + 33 + 59, 31 + 33 + 63, 31 + 33 + 97, 31 + 33 + 103, 31 + 33 + 104, 31 + 33 +
110, 31 + 34 + 50, 31 + 34 + 51, 31 + 34 + 52, 31 + 34 + 53, 31 + 34 + 55, 31 + 34 + 57,
31 + 34 + 59, 31 + 34 + 63, 31 + 34 + 97, 31 + 34 + 103, 31 + 34 + 104, 31 + 34 + 110, 31 +
50 + 51, 31 + 50 + 52, 31 + 50 + 53, 31 + 50 + 55, 31 + 50 + 57, 31 + 50 + 59, 31 + 50 +
63, 31 + 50 + 97, 31 + 50 + 103, 31 + 50 + 104, 31 + 50 + 110, 31 + 51 + 52, 31 + 51 + 53,
31 + 51 + 55, 31 + 51 + 57, 31 + 51 + 59, 31 + 51 + 63, 31 + 51 + 97, 31 + 51 + 103, 31 +
51 + 104, 31 + 51 + 110, 31 + 52 + 53, 31 + 52 + 55, 31 + 52 + 57, 31 + 52 + 59, 31 + 52 +
63, 31 + 52 + 97, 31 + 52 + 103, 31 + 52 + 104, 31 + 52 + 110, 31 + 53 + 55, 31 + 53 + 57,
31 + 53 + 59, 31 + 53 + 63, 31 + 53 + 97, 31 + 53 + 103, 31 + 53 + 104, 31 + 53 + 110, 31 +
55 + 57, 31 + 55 + 59, 31 + 55 + 63, 31 + 55 + 97, 31 + 55 + 103, 31 + 55 + 104, 31 + 55 +
110, 31 + 57 + 59, 31 + 57 + 63, 31 + 57 + 97, 31 + 57 + 103, 31 + 57 + 104, 31 + 57 +
110, 31 + 59 + 63, 31 + 59 + 97, 31 + 59 + 103, 31 + 59 + 104, 31 + 59 + 110, 31 + 63 +
97, 31 + 63 + 103, 31 + 63 + 104, 31 + 63 + 110, 31 + 97 + 103, 31 + 97 + 104, 31 + 97 +
110, 31 + 103 + 104, 31 + 103 + 110, 31 + 104 + 110, 32 + 33 + 34, 32 + 33 + 50, 32 + 33 +
51, 32 + 33 + 52, 32 + 33 + 53, 32 + 33 + 55, 32 + 33 + 57, 32 + 33 + 59, 32 + 33 + 63,
32 + 33 + 97, 32 + 33 + 103, 32 + 33 + 104, 32 + 33 + 110, 32 + 34 + 50, 32 + 34 + 51, 32 +
34 + 52, 32 + 34 + 53, 32 + 34 + 55, 32 + 34 + 57, 32 + 34 + 59, 32 + 34 + 63, 32 + 34 +
97, 32 + 34 + 103, 32 + 34 + 104, 32 + 34 + 110, 32 + 50 + 51, 32 + 50 + 52, 32 + 50 + 53,
32 + 50 + 55, 32 + 50 + 57, 32 + 50 + 59, 32 + 50 + 63, 32 + 50 + 97, 32 + 50 + 103, 32 +
50 + 104, 32 + 50 + 110, 32 + 51 + 52, 32 + 51 + 53, 32 + 51 + 55, 32 + 51 + 57, 32 + 51 +
59, 32 + 51 + 63, 32 + 51 + 97, 32 + 51 + 103, 32 + 51 + 104, 32 + 51 + 110, 32 + 52 + 53,
32 + 52 + 55, 32 + 52 + 57, 32 + 52 + 59, 32 + 52 + 63, 32 + 52 + 97, 32 + 52 + 103, 32 +
52 + 104, 32 + 52 + 110, 32 + 53 + 55, 32 + 53 + 57, 32 + 53 + 59, 32 + 53 + 63, 32 + 53 +
97, 32 + 53 + 103, 32 + 53 + 104, 32 + 53 + 110, 32 + 55 + 57, 32 + 55 + 59, 32 + 55 + 63,
32 + 55 + 97, 32 + 55 + 103, 32 + 55 + 104, 32 + 55 + 110, 32 + 57 + 59, 32 + 57 + 63, 32 +
57 + 97, 32 + 57 + 103, 32 + 57 + 104, 32 + 57 + 110, 32 + 59 + 63, 32 + 59 + 97, 32 +
59 + 103, 32 + 59 + 104, 32 + 59 + 110, 32 + 63 + 97, 32 + 63 + 103, 32 + 63 + 104, 32 +
63 + 110, 32 + 97 + 103, 32 + 97 + 104, 32 + 97 + 110, 32 + 103 + 104, 32 + 103 + 110,
32 + 104 + 110, 33 + 34 + 50, 33 + 34 + 51, 33 + 34 + 52, 33 + 34 + 53, 33 + 34 + 55, 33 +
34 + 57, 33 + 34 + 59, 33 + 34 + 63, 33 + 34 + 97, 33 + 34 + 103, 33 + 34 + 104, 33 + 34 +
110, 33 + 50 + 51, 33 + 50 + 52, 33 + 50 + 53, 33 + 50 + 55, 33 + 50 + 57, 33 + 50 + 59,
33 + 50 + 63, 33 + 50 + 97, 33 + 50 + 103, 33 + 50 + 104, 33 + 50 + 110, 33 + 51 + 52, 33 +
51 + 53, 33 + 51 + 55, 33 + 51 + 57, 33 + 51 + 59, 33 + 51 + 63, 33 + 51 + 97, 33 + 51 +
103, 33 + 51 + 104, 33 + 51 + 110, 33 + 52 + 53, 33 + 52 + 55, 33 + 52 + 57, 33 + 52 + 59,
33 + 52 + 63, 33 + 52 + 97, 33 + 52 + 103, 33 + 52 + 104, 33 + 52+ 110, 33 + 53 + 55, 33 +
53 + 57, 33 + 53 + 59, 33 + 53 + 63, 33 + 53 + 97, 33 + 53 + 103, 33 + 53 + 104, 33 + 53 +
110, 33 + 55 + 57, 33 + 55 + 59, 33 + 55 + 63, 33 + 55 + 97, 33 + 55 + 103, 33 + 55 +
104, 33 + 55 + 110, 33 + 57 + 59, 33 + 57 + 63, 33 + 57 + 97, 33 + 57 + 103, 33 + 57 +
104, 33 + 57 + 110, 33 + 59 + 63, 33 + 59 + 97, 33 + 59 + 103, 33 + 59 + 104, 33 + 59 +
110, 33 + 63 + 97, 33 + 63 + 103, 33 + 63 + 104, 33 + 63 + 110, 33 + 97 + 103, 33 + 97 +
104, 33 + 97 + 110, 33 + 103 + 104, 33 + 103 + 110, 33 + 104 + 110, 34 + 50 + 51, 34 +
50 + 52, 34 + 50 + 53, 34 + 50 + 55, 34 + 50 + 57, 34 + 50 + 59, 34 + 50 + 63, 34 + 50 +
97, 34 + 50 + 103, 34 + 50 + 104, 34 + 50 + 110, 34 + 51 + 52, 34 + 51 + 53, 34 + 51 + 55,
34 + 51 + 57, 34 + 51 + 59, 34 + 51 + 63, 34 + 51 + 97, 34 + 51 + 103, 34 + 51 + 104, 34 +
51 + 110, 34 + 52 + 53, 34 + 52 + 55, 34 + 52 + 57, 34 + 52 + 59, 34 + 52 + 63, 34 + 52 +
97, 34 + 52 + 103, 34 + 52 + 104, 34 + 52 + 110, 34 + 53 + 55, 34 + 53 + 57, 34 + 53 + 59,
34 + 53 + 63, 34 + 53 + 97, 34 + 53 + 103, 34 + 53 + 104, 34 + 53 + 110, 34 + 55 + 57, 34 +
55 + 59, 34 + 55 + 63, 34 + 55 + 97, 34 + 55 + 103, 34 + 55 + 104, 34 + 55 + 110, 34 +
57 + 59, 34 + 57 + 63, 34 + 57 + 97, 34 + 57 + 103, 34 + 57 + 104, 34 + 57 + 110, 34 + 59 +
63, 34 + 59 + 97, 34 + 59 + 103, 34 + 59 + 104, 34 + 59 + 110, 34 + 63 + 97, 34 + 63 +
103, 34 + 63 + 104, 34 + 63 + 110, 34 + 97 + 103, 34 + 97 + 104, 34 + 97 + 110, 34 + 103 +
104, 34 + 103 + 110, 34 + 104 + 110, 50 + 51 + 52, 50 + 51 + 53, 50 + 51 + 55, 50 + 51 +
57, 50 + 51 + 59, 50 + 51 + 63, 50 + 51 + 97, 50 + 51 + 103, 50 + 51 + 104, 50 + 51 +
110, 50 + 52 + 53, 50 + 52 + 55, 50 + 52 + 57, 50 + 52 + 59, 50 + 52 + 63, 50 + 52 + 97,
50 + 52 + 103, 50 + 52 + 104, 50 + 52 + 110, 50 + 53 + 55, 50 + 53 + 57, 50 + 53 + 59, 50 +
53 + 63, 50 + 53 + 97, 50 + 53 + 103, 50 + 53 + 104, 50 + 53 + 110, 50 + 55 + 57, 50 +
55 + 59, 50 + 55 + 63, 50 + 55 + 97, 50 + 55 + 103, 50 + 55 + 104, 50 + 55 + 110, 50 + 57 +
59, 50 + 57 + 63, 50 + 57 + 97, 50 + 57 + 103, 50 + 57 + 104, 50 + 57 + 110, 50 + 59 +
63, 50 + 59 + 97, 50 + 59 + 103, 50 + 59 + 104, 50 + 59 + 110, 50 + 63 + 97, 50 + 63 +
103, 50 + 63 + 104, 50 + 63 + 110, 50 + 97 + 103, 50 + 97 + 104, 50 + 97 + 110, 50 + 103 +
104, 50 + 103 + 110, 50 + 104 + 110, 51 + 52 + 53, 51 + 52 + 55, 51 + 52 + 57, 51 + 52 +
59, 51 + 52 + 63, 51 + 52 + 97, 51 + 52 + 103, 51 + 52 + 104, 51 + 52 + 110, 51 + 53 +
55, 51 + 53 + 57, 51 + 53 + 59, 51 + 53 + 63, 51 + 53 + 97, 51 + 53 + 103, 51 + 53 + 104,
51 + 53 + 110, 51 + 55 + 57, 51 + 55 + 59, 51 + 55 + 63, 51 + 55 + 97, 51 + 55 + 103, 51 +
55 + 104, 51 + 55 + 110, 51 + 57 + 59, 51 + 57 + 63, 51 + 57 + 97, 51 + 57 + 103, 51 + 57 +
104, 51 + 57 + 110, 51 + 59 + 63, 51 + 59 + 97, 51 + 59 + 103, 51 + 59 + 104, 51 + 59 +
110, 51 + 63 + 97, 51 + 63 + 103, 51 + 63 + 104, 51 + 63 + 110, 51 + 97 + 103, 51 + 97 +
104, 51 + 97 + 110, 51 + 103 + 104, 51 + 103 + 110, 51 + 104 + 110, 52 + 53 + 55, 52 +
53 + 57, 52 + 53 + 59, 52 + 53 + 63, 52 + 53 + 97, 52 + 53 + 103, 52 + 53 + 104, 52 + 53 +
110, 52 + 55 + 57, 52 + 55 + 59, 52 + 55 + 63, 52 + 55 + 97, 52 + 55 + 103, 52 + 55 + 104,
52 + 55 + 110, 52 + 57 + 59, 52 + 57 + 63, 52 + 57 + 97, 52 + 57 + 103, 52 + 57 + 104, 52 +
57 + 110, 52 + 59 + 63, 52 + 59 + 97, 52 + 59 + 103, 52 + 59 + 104, 52 + 59 + 110, 52 +
63 + 97, 52 + 63 + 103, 52 + 63 + 104, 52 + 63 + 110, 52 + 97 + 103, 52 + 97 + 104, 52 +
97 + 110, 52 + 103 + 104, 52 + 103 + 110, 52 + 104 + 110, 53 + 55 + 57, 53 + 55 + 59, 53 +
55 + 63, 53 + 55 + 97, 53 + 55 + 103, 53 + 55 + 104, 53 + 55 + 110, 53 + 57 + 59, 53 +
57 + 63, 53 + 57 + 97, 53 + 57 + 103, 53 + 57 + 104, 53 + 57 + 110, 53 + 59 + 63, 53 + 59 +
97, 53 + 59 + 103, 53 + 59 + 104, 53 + 59 + 110, 53 + 63 + 97, 53 + 63 + 103, 53 + 63 +
104, 53 + 63 + 110, 53 + 97 + 103, 53 + 97 + 104, 53 + 97 + 110, 53 + 103 + 104, 53 +
103 + 110, 53 + 104 + 110, 55 + 57 + 59, 55 + 57 + 63, 55 + 57 + 97, 55 + 57 + 103, 55 +
57 + 104, 55 + 57 + 110, 55 + 59 + 63, 55 + 59 + 97, 55 + 59 + 103, 55 + 59 + 104, 55 +
59 + 110, 55 + 63 + 97, 55 + 63 + 103, 55 + 63 + 104, 55 + 63 + 110, 55 + 97 + 103, 55 +
97 + 104, 55 + 97 + 110, 55 + 103 + 104, 55 + 103 + 110, 55 + 104 + 110, 57 + 59 + 63,
57 + 59 + 97, 57 + 59 + 103, 57 + 59 + 104, 57 + 59 + 110, 57 + 63 + 97, 57 + 63 + 103,
57 + 63 + 104, 57 + 63 + 110, 57 + 97 + 103, 57 + 97 + 104, 57 + 97 + 110, 57 + 103 +
104, 57 + 103 + 110, 57 + 104 + 110, 59 + 63 + 97, 59 + 63 + 103, 59 + 63 + 104, 59 + 63 +
110, 59 + 97 + 103, 59 + 97 + 104, 59 + 97 + 110, 59 + 103 + 104, 59 + 103 + 110, 59 +
104 + 110, 63 + 97 + 103, 63 + 97 + 104, 63 + 97 + 110, 63 + 103 + 104, 63 + 103 + 110,
63 + 104 + 110, 97 + 103 + 104, 97 + 103 + 110, 97 + 104 + 110, 103 + 104 + 110

[0154] In some examples of any of the ABPCs described herein, a light chain variable domain includes a light chain variable domain that is at least 90% (e.g., at least 92%, at least 94%, at least 96%, at least 98%, at least 99%, or 100%) identical to SEQ ID NO: 2, where the light chain variable domain includes a histidine at any of the specific combinations of one or more amino acid positions in SEQ ID NO: 2 listed in Table 2.

[0155] In some examples of any of the ABPCs described herein, the first antigen-binding domain includes a light chain variable domain that is at least 90% (e.g., at least 92%, at least 94%, at least 96%, at least 98%, at least 99%, or 100%) identical to SEQ ID NO: 2, where the light chain variable domain includes an alanine at position 98 in SEQ ID NO: 2.

[0156] In some examples of any of the ABPCs described herein the first antigen-binding domain includes: a light chain variable domain that is at least 90% (e.g., at least 92%, at least 94%, at least 96%, at least 98%, at least 99%, or 100%) identical to SEQ ID NO: 2, where the light chain variable domain includes an alanine at position 98 in SEQ ID NO: 2, and a heavy chain variable domain that is at least 90% (e.g., at least 92%, at least 94%, at least 96%, at least 98%, at least 99%, or 100%) identical to SEQ ID NO: 1, where the heavy chain variable domain includes a histidine at one or more (e.g., one, two, three, four, five, six, seven, eight, nine, ten, eleven, twelve, thirteen, fourteen, fifteen, sixteen, seventeen, eighteen, nineteen, or twenty) amino acid positions in SEQ ID NO: 1 selected from the group consisting of: 27, 28, 31, 32, 33, 34, 50, 51, 52, 53, 55, 57, 59, 63, 97, 103, 104, and 110.

[0157] In some examples of any of the ABPCs described herein, the first antigen-binding domain includes a light chain variable domain that is at least 90% (e.g., at least 92%, at least 94%, at least 96%, at least 98%, at least 99%, or 100%) identical to SEQ ID NO: 2, where the light chain variable domain includes a histidine at one or more (e.g., one, two, three, four, five, six, seven, eight, nine, ten, eleven, twelve, thirteen, fourteen, fifteen, sixteen, seventeen, eighteen, nineteen, or twenty) amino acid positions in SEQ ID NO: 2 selected from the group consisting of: 25, 26, 28, 29, 30, 33, 34, 35, 36, 37, 38, 39, 56, 95, and 97, and where the light chain variable domain includes an alanine at position 98 in SEQ ID NO: 2. In some examples of any of the ABPCs described herein the first antigen-binding domain includes: a light chain variable domain that is at least 90% (e.g., at least 92%, at least 94%, at least 96%, at least 98%, at least 99%, or 100%) identical to SEQ ID NO: 2, where the light chain variable domain includes a histidine at one or more (e.g., one, two, three, four, five, six, seven, eight, nine, ten, eleven, twelve, thirteen, fourteen, fifteen, sixteen, seventeen, eighteen, nineteen, or twenty) amino acid positions in SEQ ID NO: 2 selected from the group consisting of: 25, 26, 28, 29, 30, 33, 34, 35, 36, 37, 38, 39, 56, 95, and 97, and where the light chain variable domain includes an alanine at position 98 in SEQ ID NO: 2, and a heavy chain variable domain that is at least 90% (e.g., at least 92%, at least 94%, at least 96%, at least 98%, at least 99%, or 100%) identical to SEQ ID NO: 1, where the heavy chain variable domain includes a histidine at one or more (e.g., one, two, three, four, five, six, seven, eight, nine, ten, eleven, twelve, thirteen, fourteen, fifteen, sixteen, seventeen, eighteen, nineteen, or twenty) amino acid positions in SEQ ID NO: 1 selected from the group consisting of: 27, 28, 31, 32, 33, 34, 50, 51, 52, 53, 55, 57, 59, 63, 97, 103, 104, and 110.

[0158] In some examples of any of the ABPCs described herein, a light chain variable domain includes a light chain variable domain that is at least 90% (e.g., at least 92%, at least 94%, at least 96%, at least 98%, at least 99%, or 100%) identical to SEQ ID NO: 2, where the light chain variable domain includes a histidine at any of the specific combinations of one or more amino acid positions in SEQ ID NO: 2 listed in Table 2 and where the light chain variable domain includes an alanine at position 98 of SEQ ID NO: 2.

TABLE 2
Exemplary Combinations of Amino Acid Positions in
SEQ ID NO: 2 that can be Substituted with Histidine

25 + 26, 25 + 28, 25 + 29, 25 + 30, 25 + 33, 25 + 34, 25 + 35, 25 + 36, 25 + 37, 25 + 38, 25 +
39, 25 + 56, 25 + 95, 25 + 97, 26 + 28, 26 + 29, 26 + 30, 26 + 33, 26 + 34, 26 + 35, 26 +
36, 26 + 37, 26 + 38, 26 + 39, 26 + 56, 26 + 95, 26 + 97, 28 + 29, 28 + 30, 28 + 33, 28 +
34, 28 + 35, 28 + 36, 28 + 37, 28 + 38, 28 + 39, 28 + 56, 28 + 95, 28 + 97, 29 + 30, 29 +
33, 29 + 34, 29 + 35, 29 + 36, 29 + 37, 29 + 38, 29 + 39, 29 + 56, 29 + 95, 29 + 97, 30 +
33, 30 + 34, 30 + 35, 30 + 36, 30 + 37, 30 + 38, 30 + 39, 30 + 56, 30 + 95, 30 + 97, 33 +
34, 33 + 35, 33 + 36, 33 + 37, 33 + 38, 33 + 39, 33 + 56, 33 + 95, 33 + 97, 34 + 35, 34 +
36, 34 + 37, 34 + 38, 34 + 39, 34 + 56, 34 + 95, 34 + 97, 35 + 36, 35 + 37, 35 + 38, 35 +
39, 35 + 56, 35 + 95, 35 + 97, 36 + 37, 36 + 38, 36 + 39, 36 + 56, 36 + 95, 36 + 97, 37 +
38, 37 + 39, 37 + 56, 37 + 95, 37 + 97, 38 + 39, 38 + 56, 38 + 95, 38 + 97, 39 + 56, 39 +
95, 39 + 97, 56 + 95, 56 + 97, 95 + 97, 25 + 26 + 28, 25 + 26 + 29, 25 + 26 + 30, 25 + 26 +
33, 25 + 26 + 34, 25 + 26 + 35, 25 + 26 + 36, 25 + 26 + 37, 25 + 26 + 38, 25 + 26 + 39,
25 + 26 + 56, 25 + 26 + 95, 25 + 26 + 97, 25 + 28 + 29, 25 + 28 + 30, 25 + 28 + 33, 25 +
28 + 34, 25 + 28 + 35, 25 + 28 + 36, 25 + 28 + 37, 25 + 28 + 38, 25 + 28 + 39, 25 + 28 +
56, 25 + 28 + 95, 25 + 28 + 97, 25 + 29 + 30, 25 + 29 + 33, 25 + 29 + 34, 25 + 29 + 35, 25 +
29 + 36, 25 + 29 + 37, 25 + 29 + 38, 25 + 29 + 39, 25 + 29 + 56, 25 + 29 + 95, 25 + 29 +
97, 25 + 30 + 33, 25 + 30 + 34, 25 + 30 + 35, 25 + 30 + 36, 25 + 30 + 37, 25 + 30 + 38, 25 +
30 + 39, 25 + 30 + 56, 25 + 30 + 95, 25 + 30 + 97, 25 + 33 + 34, 25 + 33 + 35, 25 + 33 +
36, 25 + 33 + 37, 25 + 33 + 38, 25 + 33 + 39, 25 + 33 + 56, 25 + 33 + 95, 25 + 33 + 97, 25 +
34 + 35, 25 + 34 + 36, 25 + 34 + 37, 25 + 34 + 38, 25 + 34 + 39, 25 + 34 + 56, 25 + 34 +
95, 25 + 34 + 97, 25 + 35 + 36, 25 + 35 + 37, 25 + 35 + 38, 25 + 35 + 39, 25 + 35 + 56, 25 +
35 + 95, 25 + 35 + 97, 25 + 36 + 37, 25 + 36 + 38, 25 + 36 + 39, 25 + 36 + 56, 25 + 36 +
95, 25 + 36 + 97, 25 + 37 + 38, 25 + 37 + 39, 25 + 37 + 56, 25 + 37 + 95, 25 + 37 + 97, 25 +
38 + 39, 25 + 38 + 56, 25 + 38 + 95, 25 + 38 + 97, 25 + 39 + 56, 25 + 39 + 95, 25 + 39 +
97, 25 + 56 + 95, 25 + 56 + 97, 25 + 95 + 97, 26 + 28 + 29, 26 + 28 + 30, 26 + 28 + 33, 26 +
28 + 34, 26 + 28 + 35, 26 + 28 + 36, 26 + 28 + 37, 26 + 28 + 38, 26 + 28 + 39, 26 + 28 +
56, 26 + 28 + 95, 26 + 28 + 97, 26 + 29 + 30, 26 + 29 + 33, 26 + 29 + 34, 26 + 29 + 35, 26 +
29 + 36, 26 + 29 + 37, 26 + 29 + 38, 26 + 29 + 39, 26 + 29 + 56, 26 + 29 + 95, 26 + 29 +
97, 26 + 30 + 33, 26 + 30 + 34, 26 + 30 + 35, 26 + 30 + 36, 26 + 30 + 37, 26 + 30 + 38, 26 +
30 + 39, 26 + 30 + 56, 26 + 30 + 95, 26 + 30 + 97, 26 + 33 + 34, 26 + 33 + 35, 26 + 33 +
36, 26 + 33 + 37, 26 + 33 + 38, 26 + 33 + 39, 26 + 33 + 56, 26 + 33 + 95, 26 + 33 + 97, 26 +
34 + 35, 26 + 34 + 36, 26 + 34 + 37, 26 + 34 + 38, 26 + 34 + 39, 26 + 34 + 56, 26 + 34 +
95, 26 + 34 + 97, 26 + 35 + 36, 26 + 35 + 37, 26 + 35 + 38, 26 + 35 + 39, 26 + 35 + 56, 26 +
35 + 95, 26 + 35 + 97, 26 + 36 + 37, 26 + 36 + 38, 26 + 36 + 39, 26 + 36 + 56, 26 + 36 +
95, 26 + 36 + 97, 26 + 37 + 38, 26 + 37 + 39, 26 + 37 + 56, 26 + 37 + 95, 26 + 37 + 97, 26 +
38 + 39, 26 + 38 + 56, 26 + 38 + 95, 26 + 38 + 97, 26 + 39 + 56, 26 + 39 + 95, 26 + 39 +
97, 26 + 56 + 95, 26 + 56 + 97, 26 + 95 + 97, 28 + 29 + 30, 28 + 29 + 33, 28 + 29 + 34, 28 +
29 + 35, 28 + 29 + 36, 28 + 29 + 37, 28 + 29 + 38, 28 + 29 + 39, 28 + 29 + 56, 28 + 29 +
95, 28 + 29 + 97, 28 + 30 + 33, 28 + 30 + 34, 28 + 30 + 35, 28 + 30 + 36, 28 + 30 + 37, 28 +
30 + 38, 28 + 30 + 39, 28 + 30 + 56, 28 + 30 + 95, 28 + 30 + 97, 28 + 33 + 34, 28 + 33 +
35, 28 + 33 + 36, 28 + 33 + 37, 28 + 33 + 38, 28 + 33 + 39, 28 + 33 + 56, 28 + 33 + 95, 28 +
33 + 97, 28 + 34 + 35, 28 + 34 + 36, 28 + 34 + 37, 28 + 34 + 38, 28 + 34 + 39, 28 + 34 +
56, 28 + 34 + 95, 28 + 34 + 97, 28 + 35 + 36, 28 + 35 + 37, 28 + 35 + 38, 28 + 35 + 39, 28 +
35 + 56, 28 + 35 + 95, 28 + 35 + 97, 28 + 36 + 37, 28 + 36 + 38, 28 + 36 + 39, 28 + 36 +
56, 28 + 36 + 95, 28 + 36 + 97, 28 + 37 + 38, 28 + 37 + 39, 28 + 37 + 56, 28 + 37 + 95, 28 +
37 + 97, 28 + 38 + 39, 28 + 38 + 56, 28 + 38 + 95, 28 + 38 + 97, 28 + 39 + 56, 28 + 39 +
95, 28 + 39 + 97, 28 + 56 + 95, 28 + 56 + 97, 28 + 95 + 97, 29 + 30 + 33, 29 + 30 + 34, 29 +
30 + 35, 29 + 30 + 36, 29 + 30 + 37, 29 + 30 + 38, 29 + 30 + 39, 29 + 30 + 56, 29 + 30 +
95, 29 + 30 + 97, 29 + 33 + 34, 29 + 33 + 35, 29 + 33 + 36, 29 + 33 + 37, 29 + 33 + 38, 29 +
33 + 39, 29 + 33 + 56, 29 + 33 + 95, 29 + 33 + 97, 29 + 34 + 35, 29 + 34 + 36, 29 + 34 +
37, 29 + 34 + 38, 29 + 34 + 39, 29 + 34 + 56, 29 + 34 + 95, 29 + 34 + 97, 29 + 35 + 36, 29 +
35 + 37, 29 + 35 + 38, 29 + 35 + 39, 29 + 35 + 56, 29 + 35 + 95, 29 + 35 + 97, 29 + 36 +
37, 29 + 36 + 38, 29 + 36 + 39, 29 + 36 + 56, 29 + 36 + 95, 29 + 36 + 97, 29 + 37 + 38, 29 +
37 + 39, 29 + 37 + 56, 29 + 37 + 95, 29 + 37 + 97, 29 + 38 + 39, 29 + 38 + 56, 29 + 38 +
95, 29 + 38 + 97, 29 + 39 + 56, 29 + 39 + 95, 29 + 39 + 97, 29 + 56 + 95, 29 + 56 + 97, 29 +
95 + 97, 30 + 33 + 34, 30 + 33 + 35, 30 + 33 + 36, 30 + 33 + 37, 30 + 33 + 38, 30 + 33 +
39, 30 + 33 + 56, 30 + 33 + 95, 30 + 33 + 97, 30 + 34 + 35, 30 + 34 + 36, 30 + 34 + 37, 30 +
34 + 38, 30 + 34 + 39, 30 + 34 + 56, 30 + 34 + 95, 30 + 34 + 97, 30 + 35 + 36, 30 + 35 +
37, 30 + 35 + 38, 30 + 35 + 39, 30 + 35 + 56, 30 + 35 + 95, 30 + 35 + 97, 30 + 36 + 37, 30 +
36 + 38, 30 + 36 + 39, 30 + 36 + 56, 30 + 36 + 95, 30 + 36 + 97, 30 + 37 + 38, 30 + 37 +
39, 30 + 37 + 56, 30 + 37 + 95, 30 + 37 + 97, 30 + 38 + 39, 30 + 38 + 56, 30 + 38 + 95, 30 +
38 + 97, 30 + 39 + 56, 30 + 39 + 95, 30 + 39 + 97, 30 + 56 + 95, 30 + 56 + 97, 30 + 95 +
97, 33 + 34 + 35, 33 + 34 + 36, 33 + 34 + 37, 33 + 34 + 38, 33 + 34 + 39, 33 + 34 + 56, 33 +
34 + 95, 33 + 34 + 97, 33 + 35 + 36, 33 + 35 + 37, 33 + 35 + 38, 33 + 35 + 39, 33 + 35 +
56, 33 + 35 + 95, 33 + 35 + 97, 33 + 36 + 37, 33 + 36 + 38, 33 + 36 + 39, 33 + 36 + 56, 33 +
36 + 95, 33 + 36 + 97, 33 + 37 + 38, 33 + 37 + 39, 33 + 37 + 56, 33 + 37 + 95, 33 + 37 +
97, 33 + 38 + 39, 33 + 38 + 56, 33 + 38 + 95, 33 + 38 + 97, 33 + 39 + 56, 33 + 39 + 95, 33 +
39 + 97, 33 + 56 + 95, 33 + 56 + 97, 33 + 95 + 97, 34 + 35 + 36, 34 + 35 + 37, 34 + 35 +
38, 34 + 35 + 39, 34 + 35 + 56, 34 + 35 + 95, 34 + 35 + 97, 34 + 36 + 37, 34 + 36 + 38, 34 +
36 + 39, 34 + 36 + 56, 34 + 36 + 95, 34 + 36 + 97, 34 + 37 + 38, 34 + 37 + 39, 34 + 37 +
56, 34 + 37 + 95, 34 + 37 + 97, 34 + 38 + 39, 34 + 38 + 56, 34 + 38 + 95, 34 + 38 + 97, 34 +
39 + 56, 34 + 39 + 95, 34 + 39 + 97, 34 + 56 + 95, 34 + 56 + 97, 34 + 95 + 97, 35 + 36 +
37, 35 + 36 + 38, 35 + 36 + 39, 35 + 36 + 56, 35 + 36 + 95, 35 + 36 + 97, 35 + 37 + 38, 35 +
37 + 39, 35 + 37 + 56, 35 + 37 + 95, 35 + 37 + 97, 35 + 38 + 39, 35 + 38 + 56, 35 + 38 +
95, 35 + 38 + 97, 35 + 39 + 56, 35 + 39 + 95, 35 + 39 + 97, 35 + 56 + 95, 35 + 56 + 97, 35 +
95 + 97, 36 + 37 + 38, 36 + 37 + 39, 36 + 37 + 56, 36 + 37 + 95, 36 + 37 + 97, 36 + 38 +
39, 36 + 38 + 56, 36 + 38 + 95, 36 + 38 + 97, 36 + 39 + 56, 36 + 39 + 95, 36 + 39 + 97, 36 +
56 + 95, 36 + 56 + 97, 36 + 95 + 97, 37 + 38 + 39, 37 + 38 + 56, 37 + 38 + 95, 37 + 38 +
97, 37 + 39 + 56, 37 + 39 + 95, 37 + 39 + 97, 37 + 56 + 95, 37 + 56 + 97, 37 + 95 + 97, 38 +
39 + 56, 38 + 39 + 95, 38 + 39 + 97, 38 + 56 + 95, 38 + 56 + 97, 38 + 95 + 97, 39 + 56 +
95, 39 + 56 + 97, 39 + 95 + 97, 56 + 95 + 97

[0159] In some examples of any of the ABPCs described herein, the first antigen-binding domain includes a heavy chain variable domain that is at least 90% (e.g., at least 92%, at least 94%, at least 96%, at least 98%, at least 99%, or 100%) identical to SEQ ID NO: 1, where the heavy chain variable domain includes a histidine at any of the specific combinations of one or more amino acid positions in SEQ ID NO: 1 listed in Table 1; and a light chain variable domain that that is at least 90% (e.g., at least 92%, at least 94%, at least 96%, at least 98%, at least 99%, or 100%) identical to SEQ ID NO: 2, where the light chain variable domain includes a histidine at any of the specific combinations of one or more amino acid positions in SEQ ID NO: 2 listed in Table 2.

[0160] In some examples of any of the ABPCs described herein, the first antigen-binding domain comprises a light chain variable domain comprising SEQ ID NO: 2, and a heavy chain variable domain that is at least 90% identical (e.g., at least 92%, at least 94%, at least 96%, at least 98%, at least 99%, or 100%) identical to SEQ ID NO: 1, where the heavy chain variable domain includes a histidine at any of the specific combinations of one or more (e.g., two, three, four, five, six, seven, eight, nine, or ten) amino acid positions in SEQ ID NO: 1 listed in Table 1.

[0161] In some examples of any of the ABPCs described herein, the first antigen-binding domain comprises a light chain variable domain that is at least 90% identical to SEQ ID NO: 2, wherein the light chain variable domain includes a histidine at position 25 in SEQ ID NO: 2; and a heavy chain variable domain that is at least 90% (e.g., at least 92%, at least 94%, at least 96%, at least 98%, at least 99%, or 100%) identical to SEQ ID NO: 1, where the heavy chain variable domain includes a histidine at any of the specific combinations of one or more amino acid positions in SEQ ID NO: 1 listed in Table 1.

[0162] In some examples of any of the ABPCs described herein, the first antigen-binding domain comprises a light chain variable domain that is at least 90% identical to SEQ ID NO: 2, wherein the light chain variable domain includes a histidine at position 26 in SEQ ID NO: 2; and a heavy chain variable domain that is at least 90% (e.g., at least 92%, at least 94%, at least 96%, at least 98%, at least 99%, or 100%) identical to SEQ ID NO: 1, where the heavy chain variable domain includes a histidine at any of the specific combinations of one or more amino acid positions in SEQ ID NO: 1 listed in Table 1.

[0163] In some examples of any of the ABPCs described herein, the first antigen-binding domain comprises a light chain variable domain that is at least 90% identical to SEQ ID NO: 2, wherein the light chain variable domain includes a histidine at position 28 in SEQ ID NO: 2; and a heavy chain variable domain that is at least 90% (e.g., at least 92%, at least 94%, at least 96%, at least 98%, at least 99%, or 100%) identical to SEQ ID NO: 1, where the heavy chain variable domain includes a histidine at any of the specific combinations of one or more amino acid positions in SEQ ID NO: 1 listed in Table 1.

[0164] In some examples of any of the ABPCs described herein, the first antigen-binding domain comprises a light chain variable domain that is at least 90% identical to SEQ ID NO: 2, wherein the light chain variable domain includes a histidine at position 29 in SEQ ID NO: 2; and a heavy chain variable domain that is at least 90% (e.g., at least 92%, at least 94%, at least 96%, at least 98%, at least 99%, or 100%) identical to SEQ ID NO: 1, where the heavy chain variable domain includes a histidine at any of the specific combinations of one or more amino acid positions in SEQ ID NO: 1 listed in Table 1.

[0165] In some examples of any of the ABPCs described herein, the first antigen-binding domain comprises a light chain variable domain that is at least 90% identical to SEQ ID NO: 2, wherein the light chain variable domain includes a histidine at position 30 in SEQ ID NO: 2; and a heavy chain variable domain that is at least 90% (e.g., at least 92%, at least 94%, at least 96%, at least 98%, at least 99%, or 100%) identical to SEQ ID NO: 1, where the heavy chain variable domain includes a histidine at any of the specific combinations of one or more amino acid positions in SEQ ID NO: 1 listed in Table 1.

[0166] In some examples of any of the ABPCs described herein, the first antigen-binding domain comprises a light chain variable domain that is at least 90% identical to SEQ ID NO: 2, wherein the light chain variable domain includes a histidine at position 33 in SEQ ID NO: 2; and a heavy chain variable domain that is at least 90% (e.g., at least 92%, at least 94%, at least 96%, at least 98%, at least 99%, or 100%) identical to SEQ ID NO: 1, where the heavy chain variable domain includes a histidine at any of the specific combinations of one or more amino acid positions in SEQ ID NO: 1 listed in Table 1.

[0167] In some examples of any of the ABPCs described herein, the first antigen-binding domain comprises a light chain variable domain that is at least 90% identical to SEQ ID NO: 2, wherein the light chain variable domain includes a histidine at position 34 in SEQ ID NO: 2; and a heavy chain variable domain that is at least 90% (e.g., at least 92%, at least 94%, at least 96%, at least 98%, at least 99%, or 100%) identical to SEQ ID NO: 1, where the heavy chain variable domain includes a histidine at any of the specific combinations of one or more amino acid positions in SEQ ID NO: 1 listed in Table 1.

[0168] In some examples of any of the ABPCs described herein, the first antigen-binding domain comprises a light chain variable domain that is at least 90% identical to SEQ ID NO: 2, wherein the light chain variable domain includes a histidine at position 35 in SEQ ID NO: 2; and a heavy chain variable domain that is at least 90% (e.g., at least 92%, at least 94%, at least 96%, at least 98%, at least 99%, or 100%) identical to SEQ ID NO: 1, where the heavy chain variable domain includes a histidine at any of the specific combinations of one or more amino acid positions in SEQ ID NO: 1 listed in Table 1.

[0169] In some examples of any of the ABPCs described herein, the first antigen-binding domain comprises a light chain variable domain that is at least 90% identical to SEQ ID NO: 2, wherein the light chain variable domain includes a histidine at position 36 in SEQ ID NO: 2; and a heavy chain variable domain that is at least 90% (e.g., at least 92%, at least 94%, at least 96%, at least 98%, at least 99%, or 100%) identical to SEQ ID NO: 1, where the heavy chain variable domain includes a histidine at any of the specific combinations of one or more amino acid positions in SEQ ID NO: 1 listed in Table 1.

[0170] In some examples of any of the ABPCs described herein, the first antigen-binding domain comprises a light chain variable domain that is at least 90% identical to SEQ ID NO: 2, wherein the light chain variable domain includes a histidine at position 37 in SEQ ID NO: 2; and a heavy chain variable domain that is at least 90% (e.g., at least 92%, at least 94%, at least 96%, at least 98%, at least 99%, or 100%) identical to SEQ ID NO: 1, where the heavy chain variable domain includes a histidine at any of the specific combinations of one or more amino acid positions in SEQ ID NO: 1 listed in Table 1.

[0171] In some examples of any of the ABPCs described herein, the first antigen-binding domain comprises a light chain variable domain that is at least 90% identical to SEQ ID NO: 2, wherein the light chain variable domain includes a histidine at position 38 in SEQ ID NO: 2; and a heavy chain variable domain that is at least 90% (e.g., at least 92%, at least 94%, at least 96%, at least 98%, at least 99%, or 100%) identical to SEQ ID NO: 1, where the heavy chain variable domain includes a histidine at any of the specific combinations of one or more amino acid positions in SEQ ID NO: 1 listed in Table 1.

[0172] In some examples of any of the ABPCs described herein, the first antigen-binding domain comprises a light chain variable domain that is at least 90% identical to SEQ ID NO: 2, wherein the light chain variable domain includes a histidine at position 39 in SEQ ID NO: 2; and a heavy chain variable domain that is at least 90% (e.g., at least 92%, at least 94%, at least 96%, at least 98%, at least 99%, or 100%) identical to SEQ ID NO: 1, where the heavy chain variable domain includes a histidine at any of the specific combinations of one or more amino acid positions in SEQ ID NO: 1 listed in Table 1.

[0173] In some examples of any of the ABPCs described herein, the first antigen-binding domain comprises a light chain variable domain that is at least 90% identical to SEQ ID NO: 2, wherein the light chain variable domain includes a histidine at position 56 in SEQ ID NO: 2; and a heavy chain variable domain that is at least 90% (e.g., at least 92%, at least 94%, at least 96%, at least 98%, at least 99%, or 100%) identical to SEQ ID NO: 1, where the heavy chain variable domain includes a histidine at any of the specific combinations of one or more amino acid positions in SEQ ID NO: 1 listed in Table 1.

[0174] In some examples of any of the ABPCs described herein, the first antigen-binding domain comprises a light chain variable domain that is at least 90% identical to SEQ ID NO: 2, wherein the light chain variable domain includes a histidine at position 95 in SEQ ID NO: 2; and a heavy chain variable domain that is at least 90% (e.g., at least 92%, at least 94%, at least 96%, at least 98%, at least 99%, or 100%) identical to SEQ ID NO: 1, where the heavy chain variable domain includes a histidine at any of the specific combinations of one or more amino acid positions in SEQ ID NO: 1 listed in Table 1.

[0175] In some examples of any of the ABPCs described herein, the first antigen-binding domain comprises a light chain variable domain that is at least 90% identical to SEQ ID NO: 2, wherein the light chain variable domain includes a histidine at position 97 in SEQ ID NO: 2; and a heavy chain variable domain that is at least 90% (e.g., at least 92%, at least 94%, at least 96%, at least 98%, at least 99%, or 100%) identical to SEQ ID NO: 1, where the heavy chain variable domain includes a histidine at any of the specific combinations of one or more amino acid positions in SEQ ID NO: 1 listed in Table 1.

[0176] In some examples of any of the ABPCs described herein, the first antigen-binding domain comprises a light chain variable domain that is at least 90% identical to SEQ ID NO: 2, wherein the light chain variable domain includes an alanine at position 98 in SEQ ID NO: 2; and a heavy chain variable domain that is at least 90% (e.g., at least 92%, at least 94%, at least 96%, at least 98%, at least 99%, or 100%) identical to SEQ ID NO: 1, where the heavy chain variable domain includes a histidine at any of the specific combinations of one or more amino acid positions in SEQ ID NO: 1 listed in Table 1.

[0177] In some examples of any of the ABPCs described herein, the first antigen-binding domain includes a heavy chain variable domain that is at least 90% (e.g., at least 92%, at least 94%, at least 96%, at least 98%, at least 99%, or 100%) identical to SEQ ID NO: 1, where the heavy chain variable domain includes a histidine at any of the specific combinations of one or more amino acid positions in SEQ ID NO: 1 listed in Table 1, and where the heavy chain variable domain includes an alanine at position 35 in SEQ ID NO: 1; and a light chain variable domain that that is at least 90% (e.g., at least 92%, at least 94%, at least 96%, at least 98%, at least 99%, or 100%) identical to SEQ ID NO: 2, where the light chain variable domain includes an alanine as position 98.

[0178] In some examples of any of the ABPCs described herein, the first antigen-binding domain includes a heavy chain variable domain of inotuzumab with one or more (e.g., one, two, three, four, five, six, seven, eight, nine, ten, eleven, twelve, thirteen, fourteen, fifteen, sixteen, seventeen, eighteen, nineteen, or twenty) histidine(s) substituted with an alanine. In some examples of any of the ABPCs described herein, the first antigen-binding domain includes a light chain variable domain of inotuzumab with one or more (e.g., one, two, three, four, five, six, seven, eight, nine, ten, eleven, twelve, thirteen, fourteen, fifteen, sixteen, seventeen, eighteen, nineteen, or twenty) histidine(s) substituted with an alanine. In some examples of any of the ABPCs described herein, the first antigen-binding domain includes a heavy chain variable domain of inotuzumab with one or more (e.g., one, two, three, four, five, six, seven, eight, nine, ten, eleven, twelve, thirteen, fourteen, fifteen, sixteen, seventeen, eighteen, nineteen, or twenty) histidines substituted with an alanine; and a light chain variable domain of inotuzumab with one or more (e.g., one, two, three, four, five, six, seven, eight, nine, ten, eleven, twelve, thirteen, fourteen, fifteen, sixteen, seventeen, eighteen, nineteen, or twenty) histidine(s) substituted with an alanine. In some examples of any of the ABPCs described herein, the heavy chain variable domain of inotuzumab comprises SEQ ID NO: 1. In some examples of any of the ABPCs described herein, the light chain variable domain of inotuzumab comprises SEQ ID NO: 2.

[0179] In some examples of any of the ABPCs described herein, the first antigen-binding domain comprises a heavy chain variable domain comprising a CDR1, a CDR2, and a CDR3 of SEQ ID NO: 3, SEQ ID NO: 4, and SEQ ID NO: 5, respectively, with collectively a total of one or more (e.g., one, two, three, four, five, six, seven, eight, nine, or ten) histidine(s) in SEQ ID NOs: 3-5 substituted with an alanine. In some examples of any of the ABPCs described herein, the first antigen-binding domain comprises a light chain variable domain comprising a CDR1, a CDR2, and a CDR3 of SEQ ID NO: 6, SEQ ID NO: 7, and SEQ ID NO: 8, respectively, with collectively a total of one or more (e.g., one, two, three, four, five, six, seven, eight, nine, or ten) histidine(s) in SEQ ID NOs: 6-8 substituted with an alanine. In some examples of any of the ABPCs described herein, the first antigen-binding domain includes: a heavy chain variable domain comprising a CDR1, a CDR2, and a CDR3 of SEQ ID NO: 3, SEQ ID NO: 4, and SEQ ID NO: 5, respectively, with collectively a total of one or more (e.g., one, two, three, four, five, six, seven, eight, nine, or ten) histidine(s) in SEQ ID NOs: 3-5 substituted with an alanine; and a light chain variable domain comprising a CDR1, a CDR2, and a CDR3 of SEQ ID NO: 6, SEQ ID NO: 7, and SEQ ID NO: 8, respectively, with collectively a total of one or more (e.g., one, two, three, four, five, six, seven, eight, nine, or ten) histidine(s) in SEQ ID NOs: 6-8 substituted with an alanine.

[0180] In some examples of any of the ABPCs described herein, the first antigen-binding domain comprises a heavy chain variable domain of SEQ ID NO: 1, SEQ ID NO: 13, SEQ ID NO: 14, SEQ ID NO: 15, SEQ ID NO: 16, SEQ ID NO: 17, SEQ ID NO: 18, SEQ ID NO: 19, SEQ ID NO: 20, SEQ ID NO: 21, SEQ ID NO: 22, SEQ ID NO: 23, SEQ ID NO: 24, SEQ ID NO: 25, SEQ ID NO: 26, SEQ ID NO: 27, SEQ ID NO: 28, SEQ ID NO: 29, SEQ ID NO: 30, SEQ ID NO: 31, SEQ ID NO: 32, SEQ ID NO: 33, SEQ ID NO: 34, SEQ ID NO: 35, SEQ ID NO: 36, SEQ ID NO: 37, SEQ ID NO: 38, SEQ ID NO: 39, SEQ ID NO: 40, SEQ ID NO: 41, SEQ ID NO: 42, SEQ ID NO: 43, SEQ ID NO: 44, SEQ ID NO: 45, SEQ ID NO: 46, SEQ ID NO: 47, SEQ ID NO: 48, SEQ ID NO: 49, SEQ ID NO: 50, or SEQ ID NO: 51.

[0181] In some examples of any of the ABPCs described herein, the first antigen-binding domain includes a light chain variable domain of SEQ ID NO: 2, SEQ ID NO: 52, SEQ ID NO: 53, SEQ ID NO: 54, SEQ ID NO: 55, SEQ ID NO: 56, SEQ ID NO: 57, SEQ ID NO: 58, SEQ ID NO: 59, SEQ ID NO: 60, SEQ ID NO: 61, SEQ ID NO: 62, SEQ ID NO: 63, SEQ ID NO: 64, SEQ ID NO: 65, SEQ ID NO: 66, SEQ ID NO: 67, SEQ ID NO: 68, SEQ ID NO: 69, SEQ ID NO: 70, SEQ ID NO: 71, SEQ ID NO: 72, SEQ ID NO: 73, SEQ ID NO: 74, SEQ ID NO: 75, SEQ ID NO: 76, SEQ ID NO: 77, SEQ ID NO: 78, SEQ ID NO: 79, SEQ ID NO: 80, SEQ ID NO: 81, SEQ ID NO: 82, or SEQ ID NO: 83.

[0182] In some examples of any of the ABPCs described herein, the first antigen-binding domain includes a light chain variable domain comprising SEQ ID NO: 2, and a heavy chain variable domain comprising: SEQ ID NO: 13, SEQ ID NO: 14, SEQ ID NO: 15, SEQ ID NO: 16, SEQ ID NO: 17, SEQ ID NO: 18, SEQ ID NO: 19, SEQ ID NO: 20, SEQ ID NO: 21, SEQ ID NO: 22, SEQ ID NO: 23, SEQ ID NO: 24, SEQ ID NO: 25, SEQ ID NO: 26, SEQ ID NO: 27, SEQ ID NO: 28, SEQ ID NO: 29, SEQ ID NO: 30, SEQ ID NO: 31, SEQ ID NO: 32, SEQ ID NO: 33, SEQ ID NO: 34, SEQ ID NO: 35, SEQ ID NO: 36, SEQ ID NO: 37, SEQ ID NO: 38, SEQ ID NO: 39, SEQ ID NO: 40, SEQ ID NO: 41, SEQ ID NO: 42, SEQ ID NO: 43, SEQ ID NO: 44, SEQ ID NO: 45, SEQ ID NO: 46, SEQ ID NO: 47, SEQ ID NO: 48, SEQ ID NO: 49, SEQ ID NO: 50, or SEQ ID NO: 51.

[0183] In some examples of any of the ABPCs described herein, the first antigen-binding domain includes a light chain variable domain comprising SEQ ID NO: 52, and a heavy chain variable domain comprising: SEQ ID NO: 1, SEQ ID NO: 13, SEQ ID NO: 14, SEQ ID NO: 15, SEQ ID NO: 16, SEQ ID NO: 17, SEQ ID NO: 18, SEQ ID NO: 19, SEQ ID NO: 20, SEQ ID NO: 21, SEQ ID NO: 22, SEQ ID NO: 23, SEQ ID NO: 24, SEQ ID NO: 25, SEQ ID NO: 26, SEQ ID NO: 27, SEQ ID NO: 28, SEQ ID NO: 29, SEQ ID NO: 30, SEQ ID NO: 31, SEQ ID NO: 32, SEQ ID NO: 33, SEQ ID NO: 34, SEQ ID NO: 35, SEQ ID NO: 36, SEQ ID NO: 37, SEQ ID NO: 38, SEQ ID NO: 39, SEQ ID NO: 40, SEQ ID NO: 41, SEQ ID NO: 42, SEQ ID NO: 43, SEQ ID NO: 44, SEQ ID NO: 45, SEQ ID NO: 46, SEQ ID NO: 47, SEQ ID NO: 48, SEQ ID NO: 49, SEQ ID NO: 50, or SEQ ID NO: 51.

[0184] In some examples of any of the ABPCs described herein, the first antigen-binding domain includes a light chain variable domain comprising SEQ ID NO: 53, and a heavy chain variable domain comprising: SEQ ID NO: 1, SEQ ID NO: 13, SEQ ID NO: 14, SEQ ID NO: 15, SEQ ID NO: 16, SEQ ID NO: 17, SEQ ID NO: 18, SEQ ID NO: 19, SEQ ID NO: 20, SEQ ID NO: 21, SEQ ID NO: 22, SEQ ID NO: 23, SEQ ID NO: 24, SEQ ID NO: 25, SEQ ID NO: 26, SEQ ID NO: 27, SEQ ID NO: 28, SEQ ID NO: 29, SEQ ID NO: 30, SEQ ID NO: 31, SEQ ID NO: 32, SEQ ID NO: 33, SEQ ID NO: 34, SEQ ID NO: 35, SEQ ID NO: 36, SEQ ID NO: 37, SEQ ID NO: 38, SEQ ID NO: 39, SEQ ID NO: 40, SEQ ID NO: 41, SEQ ID NO: 42, SEQ ID NO: 43, SEQ ID NO: 44, SEQ ID NO: 45, SEQ ID NO: 46, SEQ ID NO: 47, SEQ ID NO: 48, SEQ ID NO: 49, SEQ ID NO: 50, or SEQ ID NO: 51.

[0185] In some examples of any of the ABPCs described herein, the first antigen-binding domain includes a light chain variable domain comprising SEQ ID NO: 54, and a heavy chain variable domain comprising: SEQ ID NO: 1, SEQ ID NO: 13, SEQ ID NO: 14, SEQ ID NO: 15, SEQ ID NO: 16, SEQ ID NO: 17, SEQ ID NO: 18, SEQ ID NO: 19, SEQ ID NO: 20, SEQ ID NO: 21, SEQ ID NO: 22, SEQ ID NO: 23, SEQ ID NO: 24, SEQ ID NO: 25, SEQ ID NO: 26, SEQ ID NO: 27, SEQ ID NO: 28, SEQ ID NO: 29, SEQ ID NO: 30, SEQ ID NO: 31, SEQ ID NO: 32, SEQ ID NO: 33, SEQ ID NO: 34, SEQ ID NO: 35, SEQ ID NO: 36, SEQ ID NO: 37, SEQ ID NO: 38, SEQ ID NO: 39, SEQ ID NO: 40, SEQ ID NO: 41, SEQ ID NO: 42, SEQ ID NO: 43, SEQ ID NO: 44, SEQ ID NO: 45, SEQ ID NO: 46, SEQ ID NO: 47, SEQ ID NO: 48, SEQ ID NO: 49, SEQ ID NO: 50, or SEQ ID NO: 51.

[0186] In some examples of any of the ABPCs described herein, the first antigen-binding domain includes a light chain variable domain comprising SEQ ID NO: 55, and a heavy chain variable domain comprising: SEQ ID NO: 1, SEQ ID NO: 13, SEQ ID NO: 14, SEQ ID NO: 15, SEQ ID NO: 16, SEQ ID NO: 17, SEQ ID NO: 18, SEQ ID NO: 19, SEQ ID NO: 20, SEQ ID NO: 21, SEQ ID NO: 22, SEQ ID NO: 23, SEQ ID NO: 24, SEQ ID NO: 25, SEQ ID NO: 26, SEQ ID NO: 27, SEQ ID NO: 28, SEQ ID NO: 29, SEQ ID NO: 30, SEQ ID NO: 31, SEQ ID NO: 32, SEQ ID NO: 33, SEQ ID NO: 34, SEQ ID NO: 35, SEQ ID NO: 36, SEQ ID NO: 37, SEQ ID NO: 38, SEQ ID NO: 39, SEQ ID NO: 40, SEQ ID NO: 41, SEQ ID NO: 42, SEQ ID NO: 43, SEQ ID NO: 44, SEQ ID NO: 45, SEQ ID NO: 46, SEQ ID NO: 47, SEQ ID NO: 48, SEQ ID NO: 49, SEQ ID NO: 50, or SEQ ID NO: 51.

[0187] In some examples of any of the ABPCs described herein, the first antigen-binding domain includes a light chain variable domain comprising SEQ ID NO: 56, and a heavy chain variable domain comprising: SEQ ID NO: 1, SEQ ID NO: 13, SEQ ID NO: 14, SEQ ID NO: 15, SEQ ID NO: 16, SEQ ID NO: 17, SEQ ID NO: 18, SEQ ID NO: 19, SEQ ID NO: 20, SEQ ID NO: 21, SEQ ID NO: 22, SEQ ID NO: 23, SEQ ID NO: 24, SEQ ID NO: 25, SEQ ID NO: 26, SEQ ID NO: 27, SEQ ID NO: 28, SEQ ID NO: 29, SEQ ID NO: 30, SEQ ID NO: 31, SEQ ID NO: 32, SEQ ID NO: 33, SEQ ID NO: 34, SEQ ID NO: 35, SEQ ID NO: 36, SEQ ID NO: 37, SEQ ID NO: 38, SEQ ID NO: 39, SEQ ID NO: 40, SEQ ID NO: 41, SEQ ID NO: 42, SEQ ID NO: 43, SEQ ID NO: 44, SEQ ID NO: 45, SEQ ID NO: 46, SEQ ID NO: 47, SEQ ID NO: 48, SEQ ID NO: 49, SEQ ID NO: 50, or SEQ ID NO: 51.

[0188] In some examples of any of the ABPCs described herein, the first antigen-binding domain includes a light chain variable domain comprising SEQ ID NO: 57, and a heavy chain variable domain comprising: SEQ ID NO: 1, SEQ ID NO: 13, SEQ ID NO: 14, SEQ ID NO: 15, SEQ ID NO: 16, SEQ ID NO: 17, SEQ ID NO: 18, SEQ ID NO: 19, SEQ ID NO: 20, SEQ ID NO: 21, SEQ ID NO: 22, SEQ ID NO: 23, SEQ ID NO: 24, SEQ ID NO: 25, SEQ ID NO: 26, SEQ ID NO: 27, SEQ ID NO: 28, SEQ ID NO: 29, SEQ ID NO: 30, SEQ ID NO: 31, SEQ ID NO: 32, SEQ ID NO: 33, SEQ ID NO: 34, SEQ ID NO: 35, SEQ ID NO: 36, SEQ ID NO: 37, SEQ ID NO: 38, SEQ ID NO: 39, SEQ ID NO: 40, SEQ ID NO: 41, SEQ ID NO: 42, SEQ ID NO: 43, SEQ ID NO: 44, SEQ ID NO: 45, SEQ ID NO: 46, SEQ ID NO: 47, SEQ ID NO: 48, SEQ ID NO: 49, SEQ ID NO: 50, or SEQ ID NO: 51.

[0189] In some examples of any of the ABPCs described herein, the first antigen-binding domain includes a light chain variable domain comprising SEQ ID NO: 58, and a heavy chain variable domain comprising: SEQ ID NO: 1, SEQ ID NO: 13, SEQ ID NO: 14, SEQ ID NO: 15, SEQ ID NO: 16, SEQ ID NO: 17, SEQ ID NO: 18, SEQ ID NO: 19, SEQ ID NO: 20, SEQ ID NO: 21, SEQ ID NO: 22, SEQ ID NO: 23, SEQ ID NO: 24, SEQ ID NO: 25, SEQ ID NO: 26, SEQ ID NO: 27, SEQ ID NO: 28, SEQ ID NO: 29, SEQ ID NO: 30, SEQ ID NO: 31, SEQ ID NO: 32, SEQ ID NO: 33, SEQ ID NO: 34, SEQ ID NO: 35, SEQ ID NO: 36, SEQ ID NO: 37, SEQ ID NO: 38, SEQ ID NO: 39, SEQ ID NO: 40, SEQ ID NO: 41, SEQ ID NO: 42, SEQ ID NO: 43, SEQ ID NO: 44, SEQ ID NO: 45, SEQ ID NO: 46, SEQ ID NO: 47, SEQ ID NO: 48, SEQ ID NO: 49, SEQ ID NO: 50, or SEQ ID NO: 51.

[0190] In some examples of any of the ABPCs described herein, the first antigen-binding domain includes a light chain variable domain comprising SEQ ID NO: 59, and a heavy chain variable domain comprising: SEQ ID NO: 1, SEQ ID NO: 13, SEQ ID NO: 14, SEQ ID NO: 15, SEQ ID NO: 16, SEQ ID NO: 17, SEQ ID NO: 18, SEQ ID NO: 19, SEQ ID NO: 20, SEQ ID NO: 21, SEQ ID NO: 22, SEQ ID NO: 23, SEQ ID NO: 24, SEQ ID NO: 25, SEQ ID NO: 26, SEQ ID NO: 27, SEQ ID NO: 28, SEQ ID NO: 29, SEQ ID NO: 30, SEQ ID NO: 31, SEQ ID NO: 32, SEQ ID NO: 33, SEQ ID NO: 34, SEQ ID NO: 35, SEQ ID NO: 36, SEQ ID NO: 37, SEQ ID NO: 38, SEQ ID NO: 39, SEQ ID NO: 40, SEQ ID NO: 41, SEQ ID NO: 42, SEQ ID NO: 43, SEQ ID NO: 44, SEQ ID NO: 45, SEQ ID NO: 46, SEQ ID NO: 47, SEQ ID NO: 48, SEQ ID NO: 49, SEQ ID NO: 50, or SEQ ID NO: 51.

[0191] In some examples of any of the ABPCs described herein, the first antigen-binding domain includes a light chain variable domain comprising SEQ ID NO: 60, and a heavy chain variable domain comprising: SEQ ID NO: 1, SEQ ID NO: 13, SEQ ID NO: 14, SEQ ID NO: 15, SEQ ID NO: 16, SEQ ID NO: 17, SEQ ID NO: 18, SEQ ID NO: 19, SEQ ID NO: 20, SEQ ID NO: 21, SEQ ID NO: 22, SEQ ID NO: 23, SEQ ID NO: 24, SEQ ID NO: 25, SEQ ID NO: 26, SEQ ID NO: 27, SEQ ID NO: 28, SEQ ID NO: 29, SEQ ID NO: 30, SEQ ID NO: 31, SEQ ID NO: 32, SEQ ID NO: 33, SEQ ID NO: 34, SEQ ID NO: 35, SEQ ID NO: 36, SEQ ID NO: 37, SEQ ID NO: 38, SEQ ID NO: 39, SEQ ID NO: 40, SEQ ID NO: 41, SEQ ID NO: 42, SEQ ID NO: 43, SEQ ID NO: 44, SEQ ID NO: 45, SEQ ID NO: 46, SEQ ID NO: 47, SEQ ID NO: 48, SEQ ID NO: 49, SEQ ID NO: 50, or SEQ ID NO: 51.

[0192] In some examples of any of the ABPCs described herein, the first antigen-binding domain includes a light chain variable domain comprising SEQ ID NO: 61, and a heavy chain variable domain comprising: SEQ ID NO: 1, SEQ ID NO: 13, SEQ ID NO: 14, SEQ ID NO: 15, SEQ ID NO: 16, SEQ ID NO: 17, SEQ ID NO: 18, SEQ ID NO: 19, SEQ ID NO: 20, SEQ ID NO: 21, SEQ ID NO: 22, SEQ ID NO: 23, SEQ ID NO: 24, SEQ ID NO: 25, SEQ ID NO: 26, SEQ ID NO: 27, SEQ ID NO: 28, SEQ ID NO: 29, SEQ ID NO: 30, SEQ ID NO: 31, SEQ ID NO: 32, SEQ ID NO: 33, SEQ ID NO: 34, SEQ ID NO: 35, SEQ ID NO: 36, SEQ ID NO: 37, SEQ ID NO: 38, SEQ ID NO: 39, SEQ ID NO: 40, SEQ ID NO: 41, SEQ ID NO: 42, SEQ ID NO: 43, SEQ ID NO: 44, SEQ ID NO: 45, SEQ ID NO: 46, SEQ ID NO: 47, SEQ ID NO: 48, SEQ ID NO: 49, SEQ ID NO: 50, or SEQ ID NO: 51.

[0193] In some examples of any of the ABPCs described herein, the first antigen-binding domain includes a light chain variable domain comprising SEQ ID NO: 62, and a heavy chain variable domain comprising: SEQ ID NO: 1, SEQ ID NO: 13, SEQ ID NO: 14, SEQ ID NO: 15, SEQ ID NO: 16, SEQ ID NO: 17, SEQ ID NO: 18, SEQ ID NO: 19, SEQ ID NO: 20, SEQ ID NO: 21, SEQ ID NO: 22, SEQ ID NO: 23, SEQ ID NO: 24, SEQ ID NO: 25, SEQ ID NO: 26, SEQ ID NO: 27, SEQ ID NO: 28, SEQ ID NO: 29, SEQ ID NO: 30, SEQ ID NO: 31, SEQ ID NO: 32, SEQ ID NO: 33, SEQ ID NO: 34, SEQ ID NO: 35, SEQ ID NO: 36, SEQ ID NO: 37, SEQ ID NO: 38, SEQ ID NO: 39, SEQ ID NO: 40, SEQ ID NO: 41, SEQ ID NO: 42, SEQ ID NO: 43, SEQ ID NO: 44, SEQ ID NO: 45, SEQ ID NO: 46, SEQ ID NO: 47, SEQ ID NO: 48, SEQ ID NO: 49, SEQ ID NO: 50, or SEQ ID NO: 51.

[0194] In some examples of any of the ABPCs described herein, the first antigen-binding domain includes a light chain variable domain comprising SEQ ID NO: 63, and a heavy chain variable domain comprising: SEQ ID NO: 1, SEQ ID NO: 13, SEQ ID NO: 14, SEQ ID NO: 15, SEQ ID NO: 16, SEQ ID NO: 17, SEQ ID NO: 18, SEQ ID NO: 19, SEQ ID NO: 20, SEQ ID NO: 21, SEQ ID NO: 22, SEQ ID NO: 23, SEQ ID NO: 24, SEQ ID NO: 25, SEQ ID NO: 26, SEQ ID NO: 27, SEQ ID NO: 28, SEQ ID NO: 29, SEQ ID NO: 30, SEQ ID NO: 31, SEQ ID NO: 32, SEQ ID NO: 33, SEQ ID NO: 34, SEQ ID NO: 35, SEQ ID NO: 36, SEQ ID NO: 37, SEQ ID NO: 38, SEQ ID NO: 39, SEQ ID NO: 40, SEQ ID NO: 41, SEQ ID NO: 42, SEQ ID NO: 43, SEQ ID NO: 44, SEQ ID NO: 45, SEQ ID NO: 46, SEQ ID NO: 47, SEQ ID NO: 48, SEQ ID NO: 49, SEQ ID NO: 50, or SEQ ID NO: 51.

[0195] In some examples of any of the ABPCs described herein, the first antigen-binding domain includes a light chain variable domain comprising SEQ ID NO: 64, and a heavy chain variable domain comprising: SEQ ID NO: 1, SEQ ID NO: 13, SEQ ID NO: 14, SEQ ID NO: 15, SEQ ID NO: 16, SEQ ID NO: 17, SEQ ID NO: 18, SEQ ID NO: 19, SEQ ID NO: 20, SEQ ID NO: 21, SEQ ID NO: 22, SEQ ID NO: 23, SEQ ID NO: 24, SEQ ID NO: 25, SEQ ID NO: 26, SEQ ID NO: 27, SEQ ID NO: 28, SEQ ID NO: 29, SEQ ID NO: 30, SEQ ID NO: 31, SEQ ID NO: 32, SEQ ID NO: 33, SEQ ID NO: 34, SEQ ID NO: 35, SEQ ID NO: 36, SEQ ID NO: 37, SEQ ID NO: 38, SEQ ID NO: 39, SEQ ID NO: 40, SEQ ID NO: 41, SEQ ID NO: 42, SEQ ID NO: 43, SEQ ID NO: 44, SEQ ID NO: 45, SEQ ID NO: 46, SEQ ID NO: 47, SEQ ID NO: 48, SEQ ID NO: 49, SEQ ID NO: 50, or SEQ ID NO: 51.

[0196] In some examples of any of the ABPCs described herein, the first antigen-binding domain includes a light chain variable domain comprising SEQ ID NO: 65, and a heavy chain variable domain comprising: SEQ ID NO: 1, SEQ ID NO: 13, SEQ ID NO: 14, SEQ ID NO: 15, SEQ ID NO: 16, SEQ ID NO: 17, SEQ ID NO: 18, SEQ ID NO: 19, SEQ ID NO: 20, SEQ ID NO: 21, SEQ ID NO: 22, SEQ ID NO: 23, SEQ ID NO: 24, SEQ ID NO: 25, SEQ ID NO: 26, SEQ ID NO: 27, SEQ ID NO: 28, SEQ ID NO: 29, SEQ ID NO: 30, SEQ ID NO: 31, SEQ ID NO: 32, SEQ ID NO: 33, SEQ ID NO: 34, SEQ ID NO: 35, SEQ ID NO: 36, SEQ ID NO: 37, SEQ ID NO: 38, SEQ ID NO: 39, SEQ ID NO: 40, SEQ ID NO: 41, SEQ ID NO: 42, SEQ ID NO: 43, SEQ ID NO: 44, SEQ ID NO: 45, SEQ ID NO: 46, SEQ ID NO: 47, SEQ ID NO: 48, SEQ ID NO: 49, SEQ ID NO: 50, or SEQ ID NO: 51.

[0197] In some examples of any of the ABPCs described herein, the first antigen-binding domain includes a light chain variable domain comprising SEQ ID NO: 66, and a heavy chain variable domain comprising: SEQ ID NO: 1, SEQ ID NO: 13, SEQ ID NO: 14, SEQ ID NO: 15, SEQ ID NO: 16, SEQ ID NO: 17, SEQ ID NO: 18, SEQ ID NO: 19, SEQ ID NO: 20, SEQ ID NO: 21, SEQ ID NO: 22, SEQ ID NO: 23, SEQ ID NO: 24, SEQ ID NO: 25, SEQ ID NO: 26, SEQ ID NO: 27, SEQ ID NO: 28, SEQ ID NO: 29, SEQ ID NO: 30, SEQ ID NO: 31, SEQ ID NO: 32, SEQ ID NO: 33, SEQ ID NO: 34, SEQ ID NO: 35, SEQ ID NO: 36, SEQ ID NO: 37, SEQ ID NO: 38, SEQ ID NO: 39, SEQ ID NO: 40, SEQ ID NO: 41, SEQ ID NO: 42, SEQ ID NO: 43, SEQ ID NO: 44, SEQ ID NO: 45, SEQ ID NO: 46, SEQ ID NO: 47, SEQ ID NO: 48, SEQ ID NO: 49, SEQ ID NO: 50, or SEQ ID NO: 51.

[0198] In some examples of any of the ABPCs described herein, the first antigen-binding domain includes a light chain variable domain comprising SEQ ID NO: 67, and a heavy chain variable domain comprising: SEQ ID NO: 1, SEQ ID NO: 13, SEQ ID NO: 14, SEQ ID NO: 15, SEQ ID NO: 16, SEQ ID NO: 17, SEQ ID NO: 18, SEQ ID NO: 19, SEQ ID NO: 20, SEQ ID NO: 21, SEQ ID NO: 22, SEQ ID NO: 23, SEQ ID NO: 24, SEQ ID NO: 25, SEQ ID NO: 26, SEQ ID NO: 27, SEQ ID NO: 28, SEQ ID NO: 29, SEQ ID NO: 30, SEQ ID NO: 31, SEQ ID NO: 32, SEQ ID NO: 33, SEQ ID NO: 34, SEQ ID NO: 35, SEQ ID NO: 36, SEQ ID NO: 37, SEQ ID NO: 38, SEQ ID NO: 39, SEQ ID NO: 40, SEQ ID NO: 41, SEQ ID NO: 42, SEQ ID NO: 43, SEQ ID NO: 44, SEQ ID NO: 45, SEQ ID NO: 46, SEQ ID NO: 47, SEQ ID NO: 48, SEQ ID NO: 49, SEQ ID NO: 50, or SEQ ID NO: 51.

[0199] In some examples of any of the ABPCs described herein, the first antigen-binding domain includes a light chain variable domain comprising SEQ ID NO: 68, and a heavy chain variable domain comprising: SEQ ID NO: 1, SEQ ID NO: 13, SEQ ID NO: 14, SEQ ID NO: 15, SEQ ID NO: 16, SEQ ID NO: 17, SEQ ID NO: 18, SEQ ID NO: 19, SEQ ID NO: 20, SEQ ID NO: 21, SEQ ID NO: 22, SEQ ID NO: 23, SEQ ID NO: 24, SEQ ID NO: 25, SEQ ID NO: 26, SEQ ID NO: 27, SEQ ID NO: 28, SEQ ID NO: 29, SEQ ID NO: 30, SEQ ID NO: 31, SEQ ID NO: 32, SEQ ID NO: 33, SEQ ID NO: 34, SEQ ID NO: 35, SEQ ID NO: 36, SEQ ID NO: 37, SEQ ID NO: 38, SEQ ID NO: 39, SEQ ID NO: 40, SEQ ID NO: 41, SEQ ID NO: 42, SEQ ID NO: 43, SEQ ID NO: 44, SEQ ID NO: 45, SEQ ID NO: 46, SEQ ID NO: 47, SEQ ID NO: 48, SEQ ID NO: 49, SEQ ID NO: 50, or SEQ ID NO: 51.

[0200] In some examples of any of the ABPCs described herein, the first antigen-binding domain includes a light chain variable domain comprising SEQ ID NO: 69, and a heavy chain variable domain comprising: SEQ ID NO: 1, SEQ ID NO: 13, SEQ ID NO: 14, SEQ ID NO: 15, SEQ ID NO: 16, SEQ ID NO: 17, SEQ ID NO: 18, SEQ ID NO: 19, SEQ ID NO: 20, SEQ ID NO: 21, SEQ ID NO: 22, SEQ ID NO: 23, SEQ ID NO: 24, SEQ ID NO: 25, SEQ ID NO: 26, SEQ ID NO: 27, SEQ ID NO: 28, SEQ ID NO: 29, SEQ ID NO: 30, SEQ ID NO: 31, SEQ ID NO: 32, SEQ ID NO: 33, SEQ ID NO: 34, SEQ ID NO: 35, SEQ ID NO: 36, SEQ ID NO: 37, SEQ ID NO: 38, SEQ ID NO: 39, SEQ ID NO: 40, SEQ ID NO: 41, SEQ ID NO: 42, SEQ ID NO: 43, SEQ ID NO: 44, SEQ ID NO: 45, SEQ ID NO: 46, SEQ ID NO: 47, SEQ ID NO: 48, SEQ ID NO: 49, SEQ ID NO: 50, or SEQ ID NO: 51.

[0201] In some examples of any of the ABPCs described herein, the first antigen-binding domain includes a light chain variable domain comprising SEQ ID NO: 70, and a heavy chain variable domain comprising: SEQ ID NO: 1, SEQ ID NO: 13, SEQ ID NO: 14, SEQ ID NO: 15, SEQ ID NO: 16, SEQ ID NO: 17, SEQ ID NO: 18, SEQ ID NO: 19, SEQ ID NO: 20, SEQ ID NO: 21, SEQ ID NO: 22, SEQ ID NO: 23, SEQ ID NO: 24, SEQ ID NO: 25, SEQ ID NO: 26, SEQ ID NO: 27, SEQ ID NO: 28, SEQ ID NO: 29, SEQ ID NO: 30, SEQ ID NO: 31, SEQ ID NO: 32, SEQ ID NO: 33, SEQ ID NO: 34, SEQ ID NO: 35, SEQ ID NO: 36, SEQ ID NO: 37, SEQ ID NO: 38, SEQ ID NO: 39, SEQ ID NO: 40, SEQ ID NO: 41, SEQ ID NO: 42, SEQ ID NO: 43, SEQ ID NO: 44, SEQ ID NO: 45, SEQ ID NO: 46, SEQ ID NO: 47, SEQ ID NO: 48, SEQ ID NO: 49, SEQ ID NO: 50, or SEQ ID NO: 51.

[0202] In some examples of any of the ABPCs described herein, the first antigen-binding domain includes a light chain variable domain comprising SEQ ID NO: 71, and a heavy chain variable domain comprising: SEQ ID NO: 1, SEQ ID NO: 13, SEQ ID NO: 14, SEQ ID NO: 15, SEQ ID NO: 16, SEQ ID NO: 17, SEQ ID NO: 18, SEQ ID NO: 19, SEQ ID NO: 20, SEQ ID NO: 21, SEQ ID NO: 22, SEQ ID NO: 23, SEQ ID NO: 24, SEQ ID NO: 25, SEQ ID NO: 26, SEQ ID NO: 27, SEQ ID NO: 28, SEQ ID NO: 29, SEQ ID NO: 30, SEQ ID NO: 31, SEQ ID NO: 32, SEQ ID NO: 33, SEQ ID NO: 34, SEQ ID NO: 35, SEQ ID NO: 36, SEQ ID NO: 37, SEQ ID NO: 38, SEQ ID NO: 39, SEQ ID NO: 40, SEQ ID NO: 41, SEQ ID NO: 42, SEQ ID NO: 43, SEQ ID NO: 44, SEQ ID NO: 45, SEQ ID NO: 46, SEQ ID NO: 47, SEQ ID NO: 48, SEQ ID NO: 49, SEQ ID NO: 50, or SEQ ID NO: 51.

[0203] In some examples of any of the ABPCs described herein, the first antigen-binding domain includes a light chain variable domain comprising SEQ ID NO: 72, and a heavy chain variable domain comprising: SEQ ID NO: 1, SEQ ID NO: 13, SEQ ID NO: 14, SEQ ID NO: 15, SEQ ID NO: 16, SEQ ID NO: 17, SEQ ID NO: 18, SEQ ID NO: 19, SEQ ID NO: 20, SEQ ID NO: 21, SEQ ID NO: 22, SEQ ID NO: 23, SEQ ID NO: 24, SEQ ID NO: 25, SEQ ID NO: 26, SEQ ID NO: 27, SEQ ID NO: 28, SEQ ID NO: 29, SEQ ID NO: 30, SEQ ID NO: 31, SEQ ID NO: 32, SEQ ID NO: 33, SEQ ID NO: 34, SEQ ID NO: 35, SEQ ID NO: 36, SEQ ID NO: 37, SEQ ID NO: 38, SEQ ID NO: 39, SEQ ID NO: 40, SEQ ID NO: 41, SEQ ID NO: 42, SEQ ID NO: 43, SEQ ID NO: 44, SEQ ID NO: 45, SEQ ID NO: 46, SEQ ID NO: 47, SEQ ID NO: 48, SEQ ID NO: 49, SEQ ID NO: 50, or SEQ ID NO: 51.

[0204] In some examples of any of the ABPCs described herein, the first antigen-binding domain includes a light chain variable domain comprising SEQ ID NO: 73, and a heavy chain variable domain comprising: SEQ ID NO: 1, SEQ ID NO: 13, SEQ ID NO: 14, SEQ ID NO: 15, SEQ ID NO: 16, SEQ ID NO: 17, SEQ ID NO: 18, SEQ ID NO: 19, SEQ ID NO: 20, SEQ ID NO: 21, SEQ ID NO: 22, SEQ ID NO: 23, SEQ ID NO: 24, SEQ ID NO: 25, SEQ ID NO: 26, SEQ ID NO: 27, SEQ ID NO: 28, SEQ ID NO: 29, SEQ ID NO: 30, SEQ ID NO: 31, SEQ ID NO: 32, SEQ ID NO: 33, SEQ ID NO: 34, SEQ ID NO: 35, SEQ ID NO: 36, SEQ ID NO: 37, SEQ ID NO: 38, SEQ ID NO: 39, SEQ ID NO: 40, SEQ ID NO: 41, SEQ ID NO: 42, SEQ ID NO: 43, SEQ ID NO: 44, SEQ ID NO: 45, SEQ ID NO: 46, SEQ ID NO: 47, SEQ ID NO: 48, SEQ ID NO: 49, SEQ ID NO: 50, or SEQ ID NO: 51.

[0205] In some examples of any of the ABPCs described herein, the first antigen-binding domain includes a light chain variable domain comprising SEQ ID NO: 74, and a heavy chain variable domain comprising: SEQ ID NO: 1, SEQ ID NO: 13, SEQ ID NO: 14, SEQ ID NO: 15, SEQ ID NO: 16, SEQ ID NO: 17, SEQ ID NO: 18, SEQ ID NO: 19, SEQ ID NO: 20, SEQ ID NO: 21, SEQ ID NO: 22, SEQ ID NO: 23, SEQ ID NO: 24, SEQ ID NO: 25, SEQ ID NO: 26, SEQ ID NO: 27, SEQ ID NO: 28, SEQ ID NO: 29, SEQ ID NO: 30, SEQ ID NO: 31, SEQ ID NO: 32, SEQ ID NO: 33, SEQ ID NO: 34, SEQ ID NO: 35, SEQ ID NO: 36, SEQ ID NO: 37, SEQ ID NO: 38, SEQ ID NO: 39, SEQ ID NO: 40, SEQ ID NO: 41, SEQ ID NO: 42, SEQ ID NO: 43, SEQ ID NO: 44, SEQ ID NO: 45, SEQ ID NO: 46, SEQ ID NO: 47, SEQ ID NO: 48, SEQ ID NO: 49, SEQ ID NO: 50, or SEQ ID NO: 51.

[0206] In some examples of any of the ABPCs described herein, the first antigen-binding domain includes a light chain variable domain comprising SEQ ID NO: 75, and a heavy chain variable domain comprising: SEQ ID NO: 1, SEQ ID NO: 13, SEQ ID NO: 14, SEQ ID NO: 15, SEQ ID NO: 16, SEQ ID NO: 17, SEQ ID NO: 18, SEQ ID NO: 19, SEQ ID NO: 20, SEQ ID NO: 21, SEQ ID NO: 22, SEQ ID NO: 23, SEQ ID NO: 24, SEQ ID NO: 25, SEQ ID NO: 26, SEQ ID NO: 27, SEQ ID NO: 28, SEQ ID NO: 29, SEQ ID NO: 30, SEQ ID NO: 31, SEQ ID NO: 32, SEQ ID NO: 33, SEQ ID NO: 34, SEQ ID NO: 35, SEQ ID NO: 36, SEQ ID NO: 37, SEQ ID NO: 38, SEQ ID NO: 39, SEQ ID NO: 40, SEQ ID NO: 41, SEQ ID NO: 42, SEQ ID NO: 43, SEQ ID NO: 44, SEQ ID NO: 45, SEQ ID NO: 46, SEQ ID NO: 47, SEQ ID NO: 48, SEQ ID NO: 49, SEQ ID NO: 50, or SEQ ID NO: 51.

[0207] In some examples of any of the ABPCs described herein, the first antigen-binding domain includes a light chain variable domain comprising SEQ ID NO: 76, and a heavy chain variable domain comprising: SEQ ID NO: 1, SEQ ID NO: 13, SEQ ID NO: 14, SEQ ID NO: 15, SEQ ID NO: 16, SEQ ID NO: 17, SEQ ID NO: 18, SEQ ID NO: 19, SEQ ID NO: 20, SEQ ID NO: 21, SEQ ID NO: 22, SEQ ID NO: 23, SEQ ID NO: 24, SEQ ID NO: 25, SEQ ID NO: 26, SEQ ID NO: 27, SEQ ID NO: 28, SEQ ID NO: 29, SEQ ID NO: 30, SEQ ID NO: 31, SEQ ID NO: 32, SEQ ID NO: 33, SEQ ID NO: 34, SEQ ID NO: 35, SEQ ID NO: 36, SEQ ID NO: 37, SEQ ID NO: 38, SEQ ID NO: 39, SEQ ID NO: 40, SEQ ID NO: 41, SEQ ID NO: 42, SEQ ID NO: 43, SEQ ID NO: 44, SEQ ID NO: 45, SEQ ID NO: 46, SEQ ID NO: 47, SEQ ID NO: 48, SEQ ID NO: 49, SEQ ID NO: 50, or SEQ ID NO: 51.

[0208] In some examples of any of the ABPCs described herein, the first antigen-binding domain includes a light chain variable domain comprising SEQ ID NO: 77, and a heavy chain variable domain comprising: SEQ ID NO: 1, SEQ ID NO: 13, SEQ ID NO: 14, SEQ ID NO: 15, SEQ ID NO: 16, SEQ ID NO: 17, SEQ ID NO: 18, SEQ ID NO: 19, SEQ ID NO: 20, SEQ ID NO: 21, SEQ ID NO: 22, SEQ ID NO: 23, SEQ ID NO: 24, SEQ ID NO: 25, SEQ ID NO: 26, SEQ ID NO: 27, SEQ ID NO: 28, SEQ ID NO: 29, SEQ ID NO: 30, SEQ ID NO: 31, SEQ ID NO: 32, SEQ ID NO: 33, SEQ ID NO: 34, SEQ ID NO: 35, SEQ ID NO: 36, SEQ ID NO: 37, SEQ ID NO: 38, SEQ ID NO: 39, SEQ ID NO: 40, SEQ ID NO: 41, SEQ ID NO: 42, SEQ ID NO: 43, SEQ ID NO: 44, SEQ ID NO: 45, SEQ ID NO: 46, SEQ ID NO: 47, SEQ ID NO: 48, SEQ ID NO: 49, SEQ ID NO: 50, or SEQ ID NO: 51.

[0209] In some examples of any of the ABPCs described herein, the first antigen-binding domain includes a light chain variable domain comprising SEQ ID NO: 78, and a heavy chain variable domain comprising: SEQ ID NO: 1, SEQ ID NO: 13, SEQ ID NO: 14, SEQ ID NO: 15, SEQ ID NO: 16, SEQ ID NO: 17, SEQ ID NO: 18, SEQ ID NO: 19, SEQ ID NO: 20, SEQ ID NO: 21, SEQ ID NO: 22, SEQ ID NO: 23, SEQ ID NO: 24, SEQ ID NO: 25, SEQ ID NO: 26, SEQ ID NO: 27, SEQ ID NO: 28, SEQ ID NO: 29, SEQ ID NO: 30, SEQ ID NO: 31, SEQ ID NO: 32, SEQ ID NO: 33, SEQ ID NO: 34, SEQ ID NO: 35, SEQ ID NO: 36, SEQ ID NO: 37, SEQ ID NO: 38, SEQ ID NO: 39, SEQ ID NO: 40, SEQ ID NO: 41, SEQ ID NO: 42, SEQ ID NO: 43, SEQ ID NO: 44, SEQ ID NO: 45, SEQ ID NO: 46, SEQ ID NO: 47, SEQ ID NO: 48, SEQ ID NO: 49, SEQ ID NO: 50, or SEQ ID NO: 51.

[0210] In some examples of any of the ABPCs described herein, the first antigen-binding domain includes a light chain variable domain comprising SEQ ID NO: 79, and a heavy chain variable domain comprising: SEQ ID NO: 1, SEQ ID NO: 13, SEQ ID NO: 14, SEQ ID NO: 15, SEQ ID NO: 16, SEQ ID NO: 17, SEQ ID NO: 18, SEQ ID NO: 19, SEQ ID NO: 20, SEQ ID NO: 21, SEQ ID NO: 22, SEQ ID NO: 23, SEQ ID NO: 24, SEQ ID NO: 25, SEQ ID NO: 26, SEQ ID NO: 27, SEQ ID NO: 28, SEQ ID NO: 29, SEQ ID NO: 30, SEQ ID NO: 31, SEQ ID NO: 32, SEQ ID NO: 33, SEQ ID NO: 34, SEQ ID NO: 35, SEQ ID NO: 36, SEQ ID NO: 37, SEQ ID NO: 38, SEQ ID NO: 39, SEQ ID NO: 40, SEQ ID NO: 41, SEQ ID NO: 42, SEQ ID NO: 43, SEQ ID NO: 44, SEQ ID NO: 45, SEQ ID NO: 46, SEQ ID NO: 47, SEQ ID NO: 48, SEQ ID NO: 49, SEQ ID NO: 50, or SEQ ID NO: 51.

[0211] In some examples of any of the ABPCs described herein, the first antigen-binding domain includes a light chain variable domain comprising SEQ ID NO: 80, and a heavy chain variable domain comprising: SEQ ID NO: 1, SEQ ID NO: 13, SEQ ID NO: 14, SEQ ID NO: 15, SEQ ID NO: 16, SEQ ID NO: 17, SEQ ID NO: 18, SEQ ID NO: 19, SEQ ID NO: 20, SEQ ID NO: 21, SEQ ID NO: 22, SEQ ID NO: 23, SEQ ID NO: 24, SEQ ID NO: 25, SEQ ID NO: 26, SEQ ID NO: 27, SEQ ID NO: 28, SEQ ID NO: 29, SEQ ID NO: 30, SEQ ID NO: 31, SEQ ID NO: 32, SEQ ID NO: 33, SEQ ID NO: 34, SEQ ID NO: 35, SEQ ID NO: 36, SEQ ID NO: 37, SEQ ID NO: 38, SEQ ID NO: 39, SEQ ID NO: 40, SEQ ID NO: 41, SEQ ID NO: 42, SEQ ID NO: 43, SEQ ID NO: 44, SEQ ID NO: 45, SEQ ID NO: 46, SEQ ID NO: 47, SEQ ID NO: 48, SEQ ID NO: 49, SEQ ID NO: 50, or SEQ ID NO: 51.

[0212] In some examples of any of the ABPCs described herein, the first antigen-binding domain includes a light chain variable domain comprising SEQ ID NO: 81, and a heavy chain variable domain comprising: SEQ ID NO: 1, SEQ ID NO: 13, SEQ ID NO: 14, SEQ ID NO: 15, SEQ ID NO: 16, SEQ ID NO: 17, SEQ ID NO: 18, SEQ ID NO: 19, SEQ ID NO: 20, SEQ ID NO: 21, SEQ ID NO: 22, SEQ ID NO: 23, SEQ ID NO: 24, SEQ ID NO: 25, SEQ ID NO: 26, SEQ ID NO: 27, SEQ ID NO: 28, SEQ ID NO: 29, SEQ ID NO: 30, SEQ ID NO: 31, SEQ ID NO: 32, SEQ ID NO: 33, SEQ ID NO: 34, SEQ ID NO: 35, SEQ ID NO: 36, SEQ ID NO: 37, SEQ ID NO: 38, SEQ ID NO: 39, SEQ ID NO: 40, SEQ ID NO: 41, SEQ ID NO: 42, SEQ ID NO: 43, SEQ ID NO: 44, SEQ ID NO: 45, SEQ ID NO: 46, SEQ ID NO: 47, SEQ ID NO: 48, SEQ ID NO: 49, SEQ ID NO: 50, or SEQ ID NO: 51.

[0213] In some examples of any of the ABPCs described herein, the first antigen-binding domain includes a light chain variable domain comprising SEQ ID NO: 82, and a heavy chain variable domain comprising: SEQ ID NO: 1, SEQ ID NO: 13, SEQ ID NO: 14, SEQ ID NO: 15, SEQ ID NO: 16, SEQ ID NO: 17, SEQ ID NO: 18, SEQ ID NO: 19, SEQ ID NO: 20, SEQ ID NO: 21, SEQ ID NO: 22, SEQ ID NO: 23, SEQ ID NO: 24, SEQ ID NO: 25, SEQ ID NO: 26, SEQ ID NO: 27, SEQ ID NO: 28, SEQ ID NO: 29, SEQ ID NO: 30, SEQ ID NO: 31, SEQ ID NO: 32, SEQ ID NO: 33, SEQ ID NO: 34, SEQ ID NO: 35, SEQ ID NO: 36, SEQ ID NO: 37, SEQ ID NO: 38, SEQ ID NO: 39, SEQ ID NO: 40, SEQ ID NO: 41, SEQ ID NO: 42, SEQ ID NO: 43, SEQ ID NO: 44, SEQ ID NO: 45, SEQ ID NO: 46, SEQ ID NO: 47, SEQ ID NO: 48, SEQ ID NO: 49, SEQ ID NO: 50, or SEQ ID NO: 51.

[0214] In some examples of any of the ABPCs described herein, the first antigen-binding domain includes a light chain variable domain comprising SEQ ID NO: 83, and a heavy chain variable domain comprising: SEQ ID NO: 1, SEQ ID NO: 13, SEQ ID NO: 14, SEQ ID NO: 15, SEQ ID NO: 16, SEQ ID NO: 17, SEQ ID NO: 18, SEQ ID NO: 19, SEQ ID NO: 20, SEQ ID NO: 21, SEQ ID NO: 22, SEQ ID NO: 23, SEQ ID NO: 24, SEQ ID NO: 25, SEQ ID NO: 26, SEQ ID NO: 27, SEQ ID NO: 28, SEQ ID NO: 29, SEQ ID NO: 30, SEQ ID NO: 31, SEQ ID NO: 32, SEQ ID NO: 33, SEQ ID NO: 34, SEQ ID NO: 35, SEQ ID NO: 36, SEQ ID NO: 37, SEQ ID NO: 38, SEQ ID NO: 39, SEQ ID NO: 40, SEQ ID NO: 41, SEQ ID NO: 42, SEQ ID NO: 43, SEQ ID NO: 44, SEQ ID NO: 45, SEQ ID NO: 46, SEQ ID NO: 47, SEQ ID NO: 48, SEQ ID NO: 49, SEQ ID NO: 50, or SEQ ID NO: 51.

[0215] In some examples of any of the ABPCs described herein, the first antigen-binding domain includes a heavy chain variable domain of SEQ ID NO: 84, SEQ ID NO: 85, SEQ ID NO: 86, SEQ ID NO: 87, SEQ ID NO: 88, SEQ ID NO: 89, SEQ ID NO: 90, SEQ ID NO: 91, SEQ ID NO: 92, SEQ ID NO: 93, SEQ ID NO: 94, SEQ ID NO: 95, SEQ ID NO: 96, SEQ ID NO: 97, SEQ ID NO: 98, SEQ ID NO: 99, SEQ ID NO: 100, SEQ ID NO: 101, SEQ ID NO: 102, SEQ ID NO: 103, SEQ ID NO: 104, SEQ ID NO: 105, SEQ ID NO: 106, SEQ ID NO: 107, SEQ ID NO: 108, SEQ ID NO: 109, SEQ ID NO: 110, SEQ ID NO: 111, SEQ ID NO: 112, SEQ ID NO: 113, SEQ ID NO: 114, SEQ ID NO: 115, SEQ ID NO: 116, SEQ ID NO: 117, SEQ ID NO: 118, SEQ ID NO: 119, SEQ ID NO: 120, SEQ ID NO: 121, SEQ ID NO: 122, SEQ ID NO: 123, SEQ ID NO: 124, SEQ ID NO: 125, SEQ ID NO: 126, SEQ ID NO: 127, SEQ ID NO: 128, SEQ ID NO: 129, SEQ ID NO: 130, SEQ ID NO: 131, SEQ ID NO: 132, SEQ ID NO: 133, SEQ ID NO: 134, SEQ ID NO: 135, SEQ ID NO: 136, SEQ ID NO: 137, or SEQ ID NO: 138.

[0216] In some examples of any of the ABPCs described herein, the first antigen-binding domain includes a heavy chain variable domain comprising SEQ ID NO: 84, and a light chain variable domain comprising SEQ ID NO: 2, SEQ ID NO: 52, SEQ ID NO: 53, SEQ ID NO: 54, SEQ ID NO: 55, SEQ ID NO: 56, SEQ ID NO: 57, SEQ ID NO: 58, SEQ ID NO: 59, SEQ ID NO: 60, SEQ ID NO: 61, SEQ ID NO: 62, SEQ ID NO: 63, SEQ ID NO: 64, SEQ ID NO: 65, SEQ ID NO: 66, SEQ ID NO: 67, SEQ ID NO: 68, SEQ ID NO: 69, SEQ ID NO: 70, SEQ ID NO: 71, SEQ ID NO: 72, SEQ ID NO: 73, SEQ ID NO: 74, SEQ ID NO: 75, SEQ ID NO: 76, SEQ ID NO: 77, SEQ ID NO: 78, SEQ ID NO: 79, SEQ ID NO: 80, SEQ ID NO: 81, SEQ ID NO: 82, or SEQ ID NO: 83.

[0217] In some examples of any of the ABPCs described herein, the first antigen-binding domain includes a heavy chain variable domain comprising SEQ ID NO: 85, and a light chain variable domain comprising SEQ ID NO: 2, SEQ ID NO: 52, SEQ ID NO: 53, SEQ ID NO: 54, SEQ ID NO: 55, SEQ ID NO: 56, SEQ ID NO: 57, SEQ ID NO: 58, SEQ ID NO: 59, SEQ ID NO: 60, SEQ ID NO: 61, SEQ ID NO: 62, SEQ ID NO: 63, SEQ ID NO: 64, SEQ ID NO: 65, SEQ ID NO: 66, SEQ ID NO: 67, SEQ ID NO: 68, SEQ ID NO: 69, SEQ ID NO: 70, SEQ ID NO: 71, SEQ ID NO: 72, SEQ ID NO: 73, SEQ ID NO: 74, SEQ ID NO: 75, SEQ ID NO: 76, SEQ ID NO: 77, SEQ ID NO: 78, SEQ ID NO: 79, SEQ ID NO: 80, SEQ ID NO: 81, SEQ ID NO: 82, or SEQ ID NO: 83.

[0218] In some examples of any of the ABPCs described herein, the first antigen-binding domain includes a heavy chain variable domain comprising SEQ ID NO: 86, and a light chain variable domain comprising SEQ ID NO: 2, SEQ ID NO: 52, SEQ ID NO: 53, SEQ ID NO: 54, SEQ ID NO: 55, SEQ ID NO: 56, SEQ ID NO: 57, SEQ ID NO: 58, SEQ ID NO: 59, SEQ ID NO: 60, SEQ ID NO: 61, SEQ ID NO: 62, SEQ ID NO: 63, SEQ ID NO: 64, SEQ ID NO: 65, SEQ ID NO: 66, SEQ ID NO: 67, SEQ ID NO: 68, SEQ ID NO: 69, SEQ ID NO: 70, SEQ ID NO: 71, SEQ ID NO: 72, SEQ ID NO: 73, SEQ ID NO: 74, SEQ ID NO: 75, SEQ ID NO: 76, SEQ ID NO: 77, SEQ ID NO: 78, SEQ ID NO: 79, SEQ ID NO: 80, SEQ ID NO: 81, SEQ ID NO: 82, or SEQ ID NO: 83.

[0219] In some examples of any of the ABPCs described herein, the first antigen-binding domain includes a heavy chain variable domain comprising SEQ ID NO: 87, and a light chain variable domain comprising SEQ ID NO: 2, SEQ ID NO: 52, SEQ ID NO: 53, SEQ ID NO: 54, SEQ ID NO: 55, SEQ ID NO: 56, SEQ ID NO: 57, SEQ ID NO: 58, SEQ ID NO: 59, SEQ ID NO: 60, SEQ ID NO: 61, SEQ ID NO: 62, SEQ ID NO: 63, SEQ ID NO: 64, SEQ ID NO: 65, SEQ ID NO: 66, SEQ ID NO: 67, SEQ ID NO: 68, SEQ ID NO: 69, SEQ ID NO: 70, SEQ ID NO: 71, SEQ ID NO: 72, SEQ ID NO: 73, SEQ ID NO: 74, SEQ ID NO: 75, SEQ ID NO: 76, SEQ ID NO: 77, SEQ ID NO: 78, SEQ ID NO: 79, SEQ ID NO: 80, SEQ ID NO: 81, SEQ ID NO: 82, or SEQ ID NO: 83.

[0220] In some examples of any of the ABPCs described herein, the first antigen-binding domain includes a heavy chain variable domain comprising SEQ ID NO: 88, and a light chain variable domain comprising SEQ ID NO: 2, SEQ ID NO: 52, SEQ ID NO: 53, SEQ ID NO: 54, SEQ ID NO: 55, SEQ ID NO: 56, SEQ ID NO: 57, SEQ ID NO: 58, SEQ ID NO: 59, SEQ ID NO: 60, SEQ ID NO: 61, SEQ ID NO: 62, SEQ ID NO: 63, SEQ ID NO: 64, SEQ ID NO: 65, SEQ ID NO: 66, SEQ ID NO: 67, SEQ ID NO: 68, SEQ ID NO: 69, SEQ ID NO: 70, SEQ ID NO: 71, SEQ ID NO: 72, SEQ ID NO: 73, SEQ ID NO: 74, SEQ ID NO: 75, SEQ ID NO: 76, SEQ ID NO: 77, SEQ ID NO: 78, SEQ ID NO: 79, SEQ ID NO: 80, SEQ ID NO: 81, SEQ ID NO: 82, or SEQ ID NO: 83.

[0221] In some examples of any of the ABPCs described herein, the first antigen-binding domain includes a heavy chain variable domain comprising SEQ ID NO: 89, and a light chain variable domain comprising SEQ ID NO: 2, SEQ ID NO: 52, SEQ ID NO: 53, SEQ ID NO: 54, SEQ ID NO: 55, SEQ ID NO: 56, SEQ ID NO: 57, SEQ ID NO: 58, SEQ ID NO: 59, SEQ ID NO: 60, SEQ ID NO: 61, SEQ ID NO: 62, SEQ ID NO: 63, SEQ ID NO: 64, SEQ ID NO: 65, SEQ ID NO: 66, SEQ ID NO: 67, SEQ ID NO: 68, SEQ ID NO: 69, SEQ ID NO: 70, SEQ ID NO: 71, SEQ ID NO: 72, SEQ ID NO: 73, SEQ ID NO: 74, SEQ ID NO: 75, SEQ ID NO: 76, SEQ ID NO: 77, SEQ ID NO: 78, SEQ ID NO: 79, SEQ ID NO: 80, SEQ ID NO: 81, SEQ ID NO: 82, or SEQ ID NO: 83.

[0222] In some examples of any of the ABPCs described herein, the first antigen-binding domain includes a heavy chain variable domain comprising SEQ ID NO: 90, and a light chain variable domain comprising SEQ ID NO: 2, SEQ ID NO: 52, SEQ ID NO: 53, SEQ ID NO: 54, SEQ ID NO: 55, SEQ ID NO: 56, SEQ ID NO: 57, SEQ ID NO: 58, SEQ ID NO: 59, SEQ ID NO: 60, SEQ ID NO: 61, SEQ ID NO: 62, SEQ ID NO: 63, SEQ ID NO: 64, SEQ ID NO: 65, SEQ ID NO: 66, SEQ ID NO: 67, SEQ ID NO: 68, SEQ ID NO: 69, SEQ ID NO: 70, SEQ ID NO: 71, SEQ ID NO: 72, SEQ ID NO: 73, SEQ ID NO: 74, SEQ ID NO: 75, SEQ ID NO: 76, SEQ ID NO: 77, SEQ ID NO: 78, SEQ ID NO: 79, SEQ ID NO: 80, SEQ ID NO: 81, SEQ ID NO: 82, or SEQ ID NO: 83.

[0223] In some examples of any of the ABPCs described herein, the first antigen-binding domain includes a heavy chain variable domain comprising SEQ ID NO: 91, and a light chain variable domain comprising SEQ ID NO: 2, SEQ ID NO: 52, SEQ ID NO: 53, SEQ ID NO: 54, SEQ ID NO: 55, SEQ ID NO: 56, SEQ ID NO: 57, SEQ ID NO: 58, SEQ ID NO: 59, SEQ ID NO: 60, SEQ ID NO: 61, SEQ ID NO: 62, SEQ ID NO: 63, SEQ ID NO: 64, SEQ ID NO: 65, SEQ ID NO: 66, SEQ ID NO: 67, SEQ ID NO: 68, SEQ ID NO: 69, SEQ ID NO: 70, SEQ ID NO: 71, SEQ ID NO: 72, SEQ ID NO: 73, SEQ ID NO: 74, SEQ ID NO: 75, SEQ ID NO: 76, SEQ ID NO: 77, SEQ ID NO: 78, SEQ ID NO: 79, SEQ ID NO: 80, SEQ ID NO: 81, SEQ ID NO: 82, or SEQ ID NO: 83.

[0224] In some examples of any of the ABPCs described herein, the first antigen-binding domain includes a heavy chain variable domain comprising SEQ ID NO: 92, and a light chain variable domain comprising SEQ ID NO: 2, SEQ ID NO: 52, SEQ ID NO: 53, SEQ ID NO: 54, SEQ ID NO: 55, SEQ ID NO: 56, SEQ ID NO: 57, SEQ ID NO: 58, SEQ ID NO: 59, SEQ ID NO: 60, SEQ ID NO: 61, SEQ ID NO: 62, SEQ ID NO: 63, SEQ ID NO: 64, SEQ ID NO: 65, SEQ ID NO: 66, SEQ ID NO: 67, SEQ ID NO: 68, SEQ ID NO: 69, SEQ ID NO: 70, SEQ ID NO: 71, SEQ ID NO: 72, SEQ ID NO: 73, SEQ ID NO: 74, SEQ ID NO: 75, SEQ ID NO: 76, SEQ ID NO: 77, SEQ ID NO: 78, SEQ ID NO: 79, SEQ ID NO: 80, SEQ ID NO: 81, SEQ ID NO: 82, or SEQ ID NO: 83.

[0225] In some examples of any of the ABPCs described herein, the first antigen-binding domain includes a heavy chain variable domain comprising SEQ ID NO: 93, and a light chain variable domain comprising SEQ ID NO: 2, SEQ ID NO: 52, SEQ ID NO: 53, SEQ ID NO: 54, SEQ ID NO: 55, SEQ ID NO: 56, SEQ ID NO: 57, SEQ ID NO: 58, SEQ ID NO: 59, SEQ ID NO: 60, SEQ ID NO: 61, SEQ ID NO: 62, SEQ ID NO: 63, SEQ ID NO: 64, SEQ ID NO: 65, SEQ ID NO: 66, SEQ ID NO: 67, SEQ ID NO: 68, SEQ ID NO: 69, SEQ ID NO: 70, SEQ ID NO: 71, SEQ ID NO: 72, SEQ ID NO: 73, SEQ ID NO: 74, SEQ ID NO: 75, SEQ ID NO: 76, SEQ ID NO: 77, SEQ ID NO: 78, SEQ ID NO: 79, SEQ ID NO: 80, SEQ ID NO: 81, SEQ ID NO: 82, or SEQ ID NO: 83.

[0226] In some examples of any of the ABPCs described herein, the first antigen-binding domain includes a heavy chain variable domain comprising SEQ ID NO: 94, and a light chain variable domain comprising SEQ ID NO: 2, SEQ ID NO: 52, SEQ ID NO: 53, SEQ ID NO: 54, SEQ ID NO: 55, SEQ ID NO: 56, SEQ ID NO: 57, SEQ ID NO: 58, SEQ ID NO: 59, SEQ ID NO: 60, SEQ ID NO: 61, SEQ ID NO: 62, SEQ ID NO: 63, SEQ ID NO: 64, SEQ ID NO: 65, SEQ ID NO: 66, SEQ ID NO: 67, SEQ ID NO: 68, SEQ ID NO: 69, SEQ ID NO: 70, SEQ ID NO: 71, SEQ ID NO: 72, SEQ ID NO: 73, SEQ ID NO: 74, SEQ ID NO: 75, SEQ ID NO: 76, SEQ ID NO: 77, SEQ ID NO: 78, SEQ ID NO: 79, SEQ ID NO: 80, SEQ ID NO: 81, SEQ ID NO: 82, or SEQ ID NO: 83.

[0227] In some examples of any of the ABPCs described herein, the first antigen-binding domain includes a heavy chain variable domain comprising SEQ ID NO: 95, and a light chain variable domain comprising SEQ ID NO: 2, SEQ ID NO: 52, SEQ ID NO: 53, SEQ ID NO: 54, SEQ ID NO: 55, SEQ ID NO: 56, SEQ ID NO: 57, SEQ ID NO: 58, SEQ ID NO: 59, SEQ ID NO: 60, SEQ ID NO: 61, SEQ ID NO: 62, SEQ ID NO: 63, SEQ ID NO: 64, SEQ ID NO: 65, SEQ ID NO: 66, SEQ ID NO: 67, SEQ ID NO: 68, SEQ ID NO: 69, SEQ ID NO: 70, SEQ ID NO: 71, SEQ ID NO: 72, SEQ ID NO: 73, SEQ ID NO: 74, SEQ ID NO: 75, SEQ ID NO: 76, SEQ ID NO: 77, SEQ ID NO: 78, SEQ ID NO: 79, SEQ ID NO: 80, SEQ ID NO: 81, SEQ ID NO: 82, or SEQ ID NO: 83.

[0228] In some examples of any of the ABPCs described herein, the first antigen-binding domain includes a heavy chain variable domain comprising SEQ ID NO: 96, and a light chain variable domain comprising SEQ ID NO: 2, SEQ ID NO: 52, SEQ ID NO: 53, SEQ ID NO: 54, SEQ ID NO: 55, SEQ ID NO: 56, SEQ ID NO: 57, SEQ ID NO: 58, SEQ ID NO: 59, SEQ ID NO: 60, SEQ ID NO: 61, SEQ ID NO: 62, SEQ ID NO: 63, SEQ ID NO: 64, SEQ ID NO: 65, SEQ ID NO: 66, SEQ ID NO: 67, SEQ ID NO: 68, SEQ ID NO: 69, SEQ ID NO: 70, SEQ ID NO: 71, SEQ ID NO: 72, SEQ ID NO: 73, SEQ ID NO: 74, SEQ ID NO: 75, SEQ ID NO: 76, SEQ ID NO: 77, SEQ ID NO: 78, SEQ ID NO: 79, SEQ ID NO: 80, SEQ ID NO: 81, SEQ ID NO: 82, or SEQ ID NO: 83.

[0229] In some examples of any of the ABPCs described herein, the first antigen-binding domain includes a heavy chain variable domain comprising SEQ ID NO: 97, and a light chain variable domain comprising SEQ ID NO: 2, SEQ ID NO: 52, SEQ ID NO: 53, SEQ ID NO: 54, SEQ ID NO: 55, SEQ ID NO: 56, SEQ ID NO: 57, SEQ ID NO: 58, SEQ ID NO: 59, SEQ ID NO: 60, SEQ ID NO: 61, SEQ ID NO: 62, SEQ ID NO: 63, SEQ ID NO: 64, SEQ ID NO: 65, SEQ ID NO: 66, SEQ ID NO: 67, SEQ ID NO: 68, SEQ ID NO: 69, SEQ ID NO: 70, SEQ ID NO: 71, SEQ ID NO: 72, SEQ ID NO: 73, SEQ ID NO: 74, SEQ ID NO: 75, SEQ ID NO: 76, SEQ ID NO: 77, SEQ ID NO: 78, SEQ ID NO: 79, SEQ ID NO: 80, SEQ ID NO: 81, SEQ ID NO: 82, or SEQ ID NO: 83.

[0230] In some examples of any of the ABPCs described herein, the first antigen-binding domain includes a heavy chain variable domain comprising SEQ ID NO: 98, and a light chain variable domain comprising SEQ ID NO: 2, SEQ ID NO: 52, SEQ ID NO: 53, SEQ ID NO: 54, SEQ ID NO: 55, SEQ ID NO: 56, SEQ ID NO: 57, SEQ ID NO: 58, SEQ ID NO: 59, SEQ ID NO: 60, SEQ ID NO: 61, SEQ ID NO: 62, SEQ ID NO: 63, SEQ ID NO: 64, SEQ ID NO: 65, SEQ ID NO: 66, SEQ ID NO: 67, SEQ ID NO: 68, SEQ ID NO: 69, SEQ ID NO: 70, SEQ ID NO: 71, SEQ ID NO: 72, SEQ ID NO: 73, SEQ ID NO: 74, SEQ ID NO: 75, SEQ ID NO: 76, SEQ ID NO: 77, SEQ ID NO: 78, SEQ ID NO: 79, SEQ ID NO: 80, SEQ ID NO: 81, SEQ ID NO: 82, or SEQ ID NO: 83.

[0231] In some examples of any of the ABPCs described herein, the first antigen-binding domain includes a heavy chain variable domain comprising SEQ ID NO: 99, and a light chain variable domain comprising SEQ ID NO: 2, SEQ ID NO: 52, SEQ ID NO: 53, SEQ ID NO: 54, SEQ ID NO: 55, SEQ ID NO: 56, SEQ ID NO: 57, SEQ ID NO: 58, SEQ ID NO: 59, SEQ ID NO: 60, SEQ ID NO: 61, SEQ ID NO: 62, SEQ ID NO: 63, SEQ ID NO: 64, SEQ ID NO: 65, SEQ ID NO: 66, SEQ ID NO: 67, SEQ ID NO: 68, SEQ ID NO: 69, SEQ ID NO: 70, SEQ ID NO: 71, SEQ ID NO: 72, SEQ ID NO: 73, SEQ ID NO: 74, SEQ ID NO: 75, SEQ ID NO: 76, SEQ ID NO: 77, SEQ ID NO: 78, SEQ ID NO: 79, SEQ ID NO: 80, SEQ ID NO: 81, SEQ ID NO: 82, or SEQ ID NO: 83.

[0232] In some examples of any of the ABPCs described herein, the first antigen-binding domain includes a heavy chain variable domain comprising SEQ ID NO: 100, and a light chain variable domain comprising SEQ ID NO: 2, SEQ ID NO: 52, SEQ ID NO: 53, SEQ ID NO: 54, SEQ ID NO: 55, SEQ ID NO: 56, SEQ ID NO: 57, SEQ ID NO: 58, SEQ ID NO: 59, SEQ ID NO: 60, SEQ ID NO: 61, SEQ ID NO: 62, SEQ ID NO: 63, SEQ ID NO: 64, SEQ ID NO: 65, SEQ ID NO: 66, SEQ ID NO: 67, SEQ ID NO: 68, SEQ ID NO: 69, SEQ ID NO: 70, SEQ ID NO: 71, SEQ ID NO: 72, SEQ ID NO: 73, SEQ ID NO: 74, SEQ ID NO: 75, SEQ ID NO: 76, SEQ ID NO: 77, SEQ ID NO: 78, SEQ ID NO: 79, SEQ ID NO: 80, SEQ ID NO: 81, SEQ ID NO: 82, or SEQ ID NO: 83.

[0233] In some examples of any of the ABPCs described herein, the first antigen-binding domain includes a heavy chain variable domain comprising SEQ ID NO: 101, and a light chain variable domain comprising SEQ ID NO: 2, SEQ ID NO: 52, SEQ ID NO: 53, SEQ ID NO: 54, SEQ ID NO: 55, SEQ ID NO: 56, SEQ ID NO: 57, SEQ ID NO: 58, SEQ ID NO: 59, SEQ ID NO: 60, SEQ ID NO: 61, SEQ ID NO: 62, SEQ ID NO: 63, SEQ ID NO: 64, SEQ ID NO: 65, SEQ ID NO: 66, SEQ ID NO: 67, SEQ ID NO: 68, SEQ ID NO: 69, SEQ ID NO: 70, SEQ ID NO: 71, SEQ ID NO: 72, SEQ ID NO: 73, SEQ ID NO: 74, SEQ ID NO: 75, SEQ ID NO: 76, SEQ ID NO: 77, SEQ ID NO: 78, SEQ ID NO: 79, SEQ ID NO: 80, SEQ ID NO: 81, SEQ ID NO: 82, or SEQ ID NO: 83.

[0234] In some examples of any of the ABPCs described herein, the first antigen-binding domain includes a heavy chain variable domain comprising SEQ ID NO: 102, and a light chain variable domain comprising SEQ ID NO: 2, SEQ ID NO: 52, SEQ ID NO: 53, SEQ ID NO: 54, SEQ ID NO: 55, SEQ ID NO: 56, SEQ ID NO: 57, SEQ ID NO: 58, SEQ ID NO: 59, SEQ ID NO: 60, SEQ ID NO: 61, SEQ ID NO: 62, SEQ ID NO: 63, SEQ ID NO: 64, SEQ ID NO: 65, SEQ ID NO: 66, SEQ ID NO: 67, SEQ ID NO: 68, SEQ ID NO: 69, SEQ ID NO: 70, SEQ ID NO: 71, SEQ ID NO: 72, SEQ ID NO: 73, SEQ ID NO: 74, SEQ ID NO: 75, SEQ ID NO: 76, SEQ ID NO: 77, SEQ ID NO: 78, SEQ ID NO: 79, SEQ ID NO: 80, SEQ ID NO: 81, SEQ ID NO: 82, or SEQ ID NO: 83.

[0235] In some examples of any of the ABPCs described herein, the first antigen-binding domain includes a heavy chain variable domain comprising SEQ ID NO: 103, and a light chain variable domain comprising SEQ ID NO: 2, SEQ ID NO: 52, SEQ ID NO: 53, SEQ ID NO: 54, SEQ ID NO: 55, SEQ ID NO: 56, SEQ ID NO: 57, SEQ ID NO: 58, SEQ ID NO: 59, SEQ ID NO: 60, SEQ ID NO: 61, SEQ ID NO: 62, SEQ ID NO: 63, SEQ ID NO: 64, SEQ ID NO: 65, SEQ ID NO: 66, SEQ ID NO: 67, SEQ ID NO: 68, SEQ ID NO: 69, SEQ ID NO: 70, SEQ ID NO: 71, SEQ ID NO: 72, SEQ ID NO: 73, SEQ ID NO: 74, SEQ ID NO: 75, SEQ ID NO: 76, SEQ ID NO: 77, SEQ ID NO: 78, SEQ ID NO: 79, SEQ ID NO: 80, SEQ ID NO: 81, SEQ ID NO: 82, or SEQ ID NO: 83.

[0236] In some examples of any of the ABPCs described herein, the first antigen-binding domain includes a heavy chain variable domain comprising SEQ ID NO: 104, and a light chain variable domain comprising SEQ ID NO: 2, SEQ ID NO: 52, SEQ ID NO: 53, SEQ ID NO: 54, SEQ ID NO: 55, SEQ ID NO: 56, SEQ ID NO: 57, SEQ ID NO: 58, SEQ ID NO: 59, SEQ ID NO: 60, SEQ ID NO: 61, SEQ ID NO: 62, SEQ ID NO: 63, SEQ ID NO: 64, SEQ ID NO: 65, SEQ ID NO: 66, SEQ ID NO: 67, SEQ ID NO: 68, SEQ ID NO: 69, SEQ ID NO: 70, SEQ ID NO: 71, SEQ ID NO: 72, SEQ ID NO: 73, SEQ ID NO: 74, SEQ ID NO: 75, SEQ ID NO: 76, SEQ ID NO: 77, SEQ ID NO: 78, SEQ ID NO: 79, SEQ ID NO: 80, SEQ ID NO: 81, SEQ ID NO: 82, or SEQ ID NO: 83.

[0237] In some examples of any of the ABPCs described herein, the first antigen-binding domain includes a heavy chain variable domain comprising SEQ ID NO: 105, and a light chain variable domain comprising SEQ ID NO: 2, SEQ ID NO: 52, SEQ ID NO: 53, SEQ ID NO: 54, SEQ ID NO: 55, SEQ ID NO: 56, SEQ ID NO: 57, SEQ ID NO: 58, SEQ ID NO: 59, SEQ ID NO: 60, SEQ ID NO: 61, SEQ ID NO: 62, SEQ ID NO: 63, SEQ ID NO: 64, SEQ ID NO: 65, SEQ ID NO: 66, SEQ ID NO: 67, SEQ ID NO: 68, SEQ ID NO: 69, SEQ ID NO: 70, SEQ ID NO: 71, SEQ ID NO: 72, SEQ ID NO: 73, SEQ ID NO: 74, SEQ ID NO: 75, SEQ ID NO: 76, SEQ ID NO: 77, SEQ ID NO: 78, SEQ ID NO: 79, SEQ ID NO: 80, SEQ ID NO: 81, SEQ ID NO: 82, or SEQ ID NO: 83.

[0238] In some examples of any of the ABPCs described herein, the first antigen-binding domain includes a heavy chain variable domain comprising SEQ ID NO: 106, and a light chain variable domain comprising SEQ ID NO: 2, SEQ ID NO: 52, SEQ ID NO: 53, SEQ ID NO: 54, SEQ ID NO: 55, SEQ ID NO: 56, SEQ ID NO: 57, SEQ ID NO: 58, SEQ ID NO: 59, SEQ ID NO: 60, SEQ ID NO: 61, SEQ ID NO: 62, SEQ ID NO: 63, SEQ ID NO: 64, SEQ ID NO: 65, SEQ ID NO: 66, SEQ ID NO: 67, SEQ ID NO: 68, SEQ ID NO: 69, SEQ ID NO: 70, SEQ ID NO: 71, SEQ ID NO: 72, SEQ ID NO: 73, SEQ ID NO: 74, SEQ ID NO: 75, SEQ ID NO: 76, SEQ ID NO: 77, SEQ ID NO: 78, SEQ ID NO: 79, SEQ ID NO: 80, SEQ ID NO: 81, SEQ ID NO: 82, or SEQ ID NO: 83.

[0239] In some examples of any of the ABPCs described herein, the first antigen-binding domain includes a heavy chain variable domain comprising SEQ ID NO: 107, and a light chain variable domain comprising SEQ ID NO: 2, SEQ ID NO: 52, SEQ ID NO: 53, SEQ ID NO: 54, SEQ ID NO: 55, SEQ ID NO: 56, SEQ ID NO: 57, SEQ ID NO: 58, SEQ ID NO: 59, SEQ ID NO: 60, SEQ ID NO: 61, SEQ ID NO: 62, SEQ ID NO: 63, SEQ ID NO: 64, SEQ ID NO: 65, SEQ ID NO: 66, SEQ ID NO: 67, SEQ ID NO: 68, SEQ ID NO: 69, SEQ ID NO: 70, SEQ ID NO: 71, SEQ ID NO: 72, SEQ ID NO: 73, SEQ ID NO: 74, SEQ ID NO: 75, SEQ ID NO: 76, SEQ ID NO: 77, SEQ ID NO: 78, SEQ ID NO: 79, SEQ ID NO: 80, SEQ ID NO: 81, SEQ ID NO: 82, or SEQ ID NO: 83.

[0240] In some examples of any of the ABPCs described herein, the first antigen-binding domain includes a heavy chain variable domain comprising SEQ ID NO: 108, and a light chain variable domain comprising SEQ ID NO: 2, SEQ ID NO: 52, SEQ ID NO: 53, SEQ ID NO: 54, SEQ ID NO: 55, SEQ ID NO: 56, SEQ ID NO: 57, SEQ ID NO: 58, SEQ ID NO: 59, SEQ ID NO: 60, SEQ ID NO: 61, SEQ ID NO: 62, SEQ ID NO: 63, SEQ ID NO: 64, SEQ ID NO: 65, SEQ ID NO: 66, SEQ ID NO: 67, SEQ ID NO: 68, SEQ ID NO: 69, SEQ ID NO: 70, SEQ ID NO: 71, SEQ ID NO: 72, SEQ ID NO: 73, SEQ ID NO: 74, SEQ ID NO: 75, SEQ ID NO: 76, SEQ ID NO: 77, SEQ ID NO: 78, SEQ ID NO: 79, SEQ ID NO: 80, SEQ ID NO: 81, SEQ ID NO: 82, or SEQ ID NO: 83.

[0241] In some examples of any of the ABPCs described herein, the first antigen-binding domain includes a heavy chain variable domain comprising SEQ ID NO: 109, and a light chain variable domain comprising SEQ ID NO: 2, SEQ ID NO: 52, SEQ ID NO: 53, SEQ ID NO: 54, SEQ ID NO: 55, SEQ ID NO: 56, SEQ ID NO: 57, SEQ ID NO: 58, SEQ ID NO: 59, SEQ ID NO: 60, SEQ ID NO: 61, SEQ ID NO: 62, SEQ ID NO: 63, SEQ ID NO: 64, SEQ ID NO: 65, SEQ ID NO: 66, SEQ ID NO: 67, SEQ ID NO: 68, SEQ ID NO: 69, SEQ ID NO: 70, SEQ ID NO: 71, SEQ ID NO: 72, SEQ ID NO: 73, SEQ ID NO: 74, SEQ ID NO: 75, SEQ ID NO: 76, SEQ ID NO: 77, SEQ ID NO: 78, SEQ ID NO: 79, SEQ ID NO: 80, SEQ ID NO: 81, SEQ ID NO: 82, or SEQ ID NO: 83.

[0242] In some examples of any of the ABPCs described herein, the first antigen-binding domain includes a heavy chain variable domain comprising SEQ ID NO: 110, and a light chain variable domain comprising SEQ ID NO: 2, SEQ ID NO: 52, SEQ ID NO: 53, SEQ ID NO: 54, SEQ ID NO: 55, SEQ ID NO: 56, SEQ ID NO: 57, SEQ ID NO: 58, SEQ ID NO: 59, SEQ ID NO: 60, SEQ ID NO: 61, SEQ ID NO: 62, SEQ ID NO: 63, SEQ ID NO: 64, SEQ ID NO: 65, SEQ ID NO: 66, SEQ ID NO: 67, SEQ ID NO: 68, SEQ ID NO: 69, SEQ ID NO: 70, SEQ ID NO: 71, SEQ ID NO: 72, SEQ ID NO: 73, SEQ ID NO: 74, SEQ ID NO: 75, SEQ ID NO: 76, SEQ ID NO: 77, SEQ ID NO: 78, SEQ ID NO: 79, SEQ ID NO: 80, SEQ ID NO: 81, SEQ ID NO: 82, or SEQ ID NO: 83.

[0243] In some examples of any of the ABPCs described herein, the first antigen-binding domain includes a heavy chain variable domain comprising SEQ ID NO: 111, and a light chain variable domain comprising SEQ ID NO: 2, SEQ ID NO: 52, SEQ ID NO: 53, SEQ ID NO: 54, SEQ ID NO: 55, SEQ ID NO: 56, SEQ ID NO: 57, SEQ ID NO: 58, SEQ ID NO: 59, SEQ ID NO: 60, SEQ ID NO: 61, SEQ ID NO: 62, SEQ ID NO: 63, SEQ ID NO: 64, SEQ ID NO: 65, SEQ ID NO: 66, SEQ ID NO: 67, SEQ ID NO: 68, SEQ ID NO: 69, SEQ ID NO: 70, SEQ ID NO: 71, SEQ ID NO: 72, SEQ ID NO: 73, SEQ ID NO: 74, SEQ ID NO: 75, SEQ ID NO: 76, SEQ ID NO: 77, SEQ ID NO: 78, SEQ ID NO: 79, SEQ ID NO: 80, SEQ ID NO: 81, SEQ ID NO: 82, or SEQ ID NO: 83.

[0244] In some examples of any of the ABPCs described herein, the first antigen-binding domain includes a heavy chain variable domain comprising SEQ ID NO: 112, and a light chain variable domain comprising SEQ ID NO: 2, SEQ ID NO: 52, SEQ ID NO: 53, SEQ ID NO: 54, SEQ ID NO: 55, SEQ ID NO: 56, SEQ ID NO: 57, SEQ ID NO: 58, SEQ ID NO: 59, SEQ ID NO: 60, SEQ ID NO: 61, SEQ ID NO: 62, SEQ ID NO: 63, SEQ ID NO: 64, SEQ ID NO: 65, SEQ ID NO: 66, SEQ ID NO: 67, SEQ ID NO: 68, SEQ ID NO: 69, SEQ ID NO: 70, SEQ ID NO: 71, SEQ ID NO: 72, SEQ ID NO: 73, SEQ ID NO: 74, SEQ ID NO: 75, SEQ ID NO: 76, SEQ ID NO: 77, SEQ ID NO: 78, SEQ ID NO: 79, SEQ ID NO: 80, SEQ ID NO: 81, SEQ ID NO: 82, or SEQ ID NO: 83.

[0245] In some examples of any of the ABPCs described herein, the first antigen-binding domain includes a heavy chain variable domain comprising SEQ ID NO: 113, and a light chain variable domain comprising SEQ ID NO: 2, SEQ ID NO: 52, SEQ ID NO: 53, SEQ ID NO: 54, SEQ ID NO: 55, SEQ ID NO: 56, SEQ ID NO: 57, SEQ ID NO: 58, SEQ ID NO: 59, SEQ ID NO: 60, SEQ ID NO: 61, SEQ ID NO: 62, SEQ ID NO: 63, SEQ ID NO: 64, SEQ ID NO: 65, SEQ ID NO: 66, SEQ ID NO: 67, SEQ ID NO: 68, SEQ ID NO: 69, SEQ ID NO: 70, SEQ ID NO: 71, SEQ ID NO: 72, SEQ ID NO: 73, SEQ ID NO: 74, SEQ ID NO: 75, SEQ ID NO: 76, SEQ ID NO: 77, SEQ ID NO: 78, SEQ ID NO: 79, SEQ ID NO: 80, SEQ ID NO: 81, SEQ ID NO: 82, or SEQ ID NO: 83.

[0246] In some examples of any of the ABPCs described herein, the first antigen-binding domain includes a heavy chain variable domain comprising SEQ ID NO: 114, and a light chain variable domain comprising SEQ ID NO: 2, SEQ ID NO: 52, SEQ ID NO: 53, SEQ ID NO: 54, SEQ ID NO: 55, SEQ ID NO: 56, SEQ ID NO: 57, SEQ ID NO: 58, SEQ ID NO: 59, SEQ ID NO: 60, SEQ ID NO: 61, SEQ ID NO: 62, SEQ ID NO: 63, SEQ ID NO: 64, SEQ ID NO: 65, SEQ ID NO: 66, SEQ ID NO: 67, SEQ ID NO: 68, SEQ ID NO: 69, SEQ ID NO: 70, SEQ ID NO: 71, SEQ ID NO: 72, SEQ ID NO: 73, SEQ ID NO: 74, SEQ ID NO: 75, SEQ ID NO: 76, SEQ ID NO: 77, SEQ ID NO: 78, SEQ ID NO: 79, SEQ ID NO: 80, SEQ ID NO: 81, SEQ ID NO: 82, or SEQ ID NO: 83.

[0247] In some examples of any of the ABPCs described herein, the first antigen-binding domain includes a heavy chain variable domain comprising SEQ ID NO: 115, and a light chain variable domain comprising SEQ ID NO: 2, SEQ ID NO: 52, SEQ ID NO: 53, SEQ ID NO: 54, SEQ ID NO: 55, SEQ ID NO: 56, SEQ ID NO: 57, SEQ ID NO: 58, SEQ ID NO: 59, SEQ ID NO: 60, SEQ ID NO: 61, SEQ ID NO: 62, SEQ ID NO: 63, SEQ ID NO: 64, SEQ ID NO: 65, SEQ ID NO: 66, SEQ ID NO: 67, SEQ ID NO: 68, SEQ ID NO: 69, SEQ ID NO: 70, SEQ ID NO: 71, SEQ ID NO: 72, SEQ ID NO: 73, SEQ ID NO: 74, SEQ ID NO: 75, SEQ ID NO: 76, SEQ ID NO: 77, SEQ ID NO: 78, SEQ ID NO: 79, SEQ ID NO: 80, SEQ ID NO: 81, SEQ ID NO: 82, or SEQ ID NO: 83.

[0248] In some examples of any of the ABPCs described herein, the first antigen-binding domain includes a heavy chain variable domain comprising SEQ ID NO: 116, and a light chain variable domain comprising SEQ ID NO: 2, SEQ ID NO: 52, SEQ ID NO: 53, SEQ ID NO: 54, SEQ ID NO: 55, SEQ ID NO: 56, SEQ ID NO: 57, SEQ ID NO: 58, SEQ ID NO: 59, SEQ ID NO: 60, SEQ ID NO: 61, SEQ ID NO: 62, SEQ ID NO: 63, SEQ ID NO: 64, SEQ ID NO: 65, SEQ ID NO: 66, SEQ ID NO: 67, SEQ ID NO: 68, SEQ ID NO: 69, SEQ ID NO: 70, SEQ ID NO: 71, SEQ ID NO: 72, SEQ ID NO: 73, SEQ ID NO: 74, SEQ ID NO: 75, SEQ ID NO: 76, SEQ ID NO: 77, SEQ ID NO: 78, SEQ ID NO: 79, SEQ ID NO: 80, SEQ ID NO: 81, SEQ ID NO: 82, or SEQ ID NO: 83.

[0249] In some examples of any of the ABPCs described herein, the first antigen-binding domain includes a heavy chain variable domain comprising SEQ ID NO: 117, and a light chain variable domain comprising SEQ ID NO: 2, SEQ ID NO: 52, SEQ ID NO: 53, SEQ ID NO: 54, SEQ ID NO: 55, SEQ ID NO: 56, SEQ ID NO: 57, SEQ ID NO: 58, SEQ ID NO: 59, SEQ ID NO: 60, SEQ ID NO: 61, SEQ ID NO: 62, SEQ ID NO: 63, SEQ ID NO: 64, SEQ ID NO: 65, SEQ ID NO: 66, SEQ ID NO: 67, SEQ ID NO: 68, SEQ ID NO: 69, SEQ ID NO: 70, SEQ ID NO: 71, SEQ ID NO: 72, SEQ ID NO: 73, SEQ ID NO: 74, SEQ ID NO: 75, SEQ ID NO: 76, SEQ ID NO: 77, SEQ ID NO: 78, SEQ ID NO: 79, SEQ ID NO: 80, SEQ ID NO: 81, SEQ ID NO: 82, or SEQ ID NO: 83.

[0250] In some examples of any of the ABPCs described herein, the first antigen-binding domain includes a heavy chain variable domain comprising SEQ ID NO: 118, and a light chain variable domain comprising SEQ ID NO: 2, SEQ ID NO: 52, SEQ ID NO: 53, SEQ ID NO: 54, SEQ ID NO: 55, SEQ ID NO: 56, SEQ ID NO: 57, SEQ ID NO: 58, SEQ ID NO: 59, SEQ ID NO: 60, SEQ ID NO: 61, SEQ ID NO: 62, SEQ ID NO: 63, SEQ ID NO: 64, SEQ ID NO: 65, SEQ ID NO: 66, SEQ ID NO: 67, SEQ ID NO: 68, SEQ ID NO: 69, SEQ ID NO: 70, SEQ ID NO: 71, SEQ ID NO: 72, SEQ ID NO: 73, SEQ ID NO: 74, SEQ ID NO: 75, SEQ ID NO: 76, SEQ ID NO: 77, SEQ ID NO: 78, SEQ ID NO: 79, SEQ ID NO: 80, SEQ ID NO: 81, SEQ ID NO: 82, or SEQ ID NO: 83.

[0251] In some examples of any of the ABPCs described herein, the first antigen-binding domain includes a heavy chain variable domain comprising SEQ ID NO: 119, and a light chain variable domain comprising SEQ ID NO: 2, SEQ ID NO: 52, SEQ ID NO: 53, SEQ ID NO: 54, SEQ ID NO: 55, SEQ ID NO: 56, SEQ ID NO: 57, SEQ ID NO: 58, SEQ ID NO: 59, SEQ ID NO: 60, SEQ ID NO: 61, SEQ ID NO: 62, SEQ ID NO: 63, SEQ ID NO: 64, SEQ ID NO: 65, SEQ ID NO: 66, SEQ ID NO: 67, SEQ ID NO: 68, SEQ ID NO: 69, SEQ ID NO: 70, SEQ ID NO: 71, SEQ ID NO: 72, SEQ ID NO: 73, SEQ ID NO: 74, SEQ ID NO: 75, SEQ ID NO: 76, SEQ ID NO: 77, SEQ ID NO: 78, SEQ ID NO: 79, SEQ ID NO: 80, SEQ ID NO: 81, SEQ ID NO: 82, or SEQ ID NO: 83.

[0252] In some examples of any of the ABPCs described herein, the first antigen-binding domain includes a heavy chain variable domain comprising SEQ ID NO: 120, and a light chain variable domain comprising SEQ ID NO: 2, SEQ ID NO: 52, SEQ ID NO: 53, SEQ ID NO: 54, SEQ ID NO: 55, SEQ ID NO: 56, SEQ ID NO: 57, SEQ ID NO: 58, SEQ ID NO: 59, SEQ ID NO: 60, SEQ ID NO: 61, SEQ ID NO: 62, SEQ ID NO: 63, SEQ ID NO: 64, SEQ ID NO: 65, SEQ ID NO: 66, SEQ ID NO: 67, SEQ ID NO: 68, SEQ ID NO: 69, SEQ ID NO: 70, SEQ ID NO: 71, SEQ ID NO: 72, SEQ ID NO: 73, SEQ ID NO: 74, SEQ ID NO: 75, SEQ ID NO: 76, SEQ ID NO: 77, SEQ ID NO: 78, SEQ ID NO: 79, SEQ ID NO: 80, SEQ ID NO: 81, SEQ ID NO: 82, or SEQ ID NO: 83.

[0253] In some examples of any of the ABPCs described herein, the first antigen-binding domain includes a heavy chain variable domain comprising SEQ ID NO: 121, and a light chain variable domain comprising SEQ ID NO: 2, SEQ ID NO: 52, SEQ ID NO: 53, SEQ ID NO: 54, SEQ ID NO: 55, SEQ ID NO: 56, SEQ ID NO: 57, SEQ ID NO: 58, SEQ ID NO: 59, SEQ ID NO: 60, SEQ ID NO: 61, SEQ ID NO: 62, SEQ ID NO: 63, SEQ ID NO: 64, SEQ ID NO: 65, SEQ ID NO: 66, SEQ ID NO: 67, SEQ ID NO: 68, SEQ ID NO: 69, SEQ ID NO: 70, SEQ ID NO: 71, SEQ ID NO: 72, SEQ ID NO: 73, SEQ ID NO: 74, SEQ ID NO: 75, SEQ ID NO: 76, SEQ ID NO: 77, SEQ ID NO: 78, SEQ ID NO: 79, SEQ ID NO: 80, SEQ ID NO: 81, SEQ ID NO: 82, or SEQ ID NO: 83.

[0254] In some examples of any of the ABPCs described herein, the first antigen-binding domain includes a heavy chain variable domain comprising SEQ ID NO: 122, and a light chain variable domain comprising SEQ ID NO: 2, SEQ ID NO: 52, SEQ ID NO: 53, SEQ ID NO: 54, SEQ ID NO: 55, SEQ ID NO: 56, SEQ ID NO: 57, SEQ ID NO: 58, SEQ ID NO: 59, SEQ ID NO: 60, SEQ ID NO: 61, SEQ ID NO: 62, SEQ ID NO: 63, SEQ ID NO: 64, SEQ ID NO: 65, SEQ ID NO: 66, SEQ ID NO: 67, SEQ ID NO: 68, SEQ ID NO: 69, SEQ ID NO: 70, SEQ ID NO: 71, SEQ ID NO: 72, SEQ ID NO: 73, SEQ ID NO: 74, SEQ ID NO: 75, SEQ ID NO: 76, SEQ ID NO: 77, SEQ ID NO: 78, SEQ ID NO: 79, SEQ ID NO: 80, SEQ ID NO: 81, SEQ ID NO: 82, or SEQ ID NO: 83.

[0255] In some examples of any of the ABPCs described herein, the first antigen-binding domain includes a heavy chain variable domain comprising SEQ ID NO: 123, and a light chain variable domain comprising SEQ ID NO: 2, SEQ ID NO: 52, SEQ ID NO: 53, SEQ ID NO: 54, SEQ ID NO: 55, SEQ ID NO: 56, SEQ ID NO: 57, SEQ ID NO: 58, SEQ ID NO: 59, SEQ ID NO: 60, SEQ ID NO: 61, SEQ ID NO: 62, SEQ ID NO: 63, SEQ ID NO: 64, SEQ ID NO: 65, SEQ ID NO: 66, SEQ ID NO: 67, SEQ ID NO: 68, SEQ ID NO: 69, SEQ ID NO: 70, SEQ ID NO: 71, SEQ ID NO: 72, SEQ ID NO: 73, SEQ ID NO: 74, SEQ ID NO: 75, SEQ ID NO: 76, SEQ ID NO: 77, SEQ ID NO: 78, SEQ ID NO: 79, SEQ ID NO: 80, SEQ ID NO: 81, SEQ ID NO: 82, or SEQ ID NO: 83.

[0256] In some examples of any of the ABPCs described herein, the first antigen-binding domain includes a heavy chain variable domain comprising SEQ ID NO: 124, and a light chain variable domain comprising SEQ ID NO: 2, SEQ ID NO: 52, SEQ ID NO: 53, SEQ ID NO: 54, SEQ ID NO: 55, SEQ ID NO: 56, SEQ ID NO: 57, SEQ ID NO: 58, SEQ ID NO: 59, SEQ ID NO: 60, SEQ ID NO: 61, SEQ ID NO: 62, SEQ ID NO: 63, SEQ ID NO: 64, SEQ ID NO: 65, SEQ ID NO: 66, SEQ ID NO: 67, SEQ ID NO: 68, SEQ ID NO: 69, SEQ ID NO: 70, SEQ ID NO: 71, SEQ ID NO: 72, SEQ ID NO: 73, SEQ ID NO: 74, SEQ ID NO: 75, SEQ ID NO: 76, SEQ ID NO: 77, SEQ ID NO: 78, SEQ ID NO: 79, SEQ ID NO: 80, SEQ ID NO: 81, SEQ ID NO: 82, or SEQ ID NO: 83.

[0257] In some examples of any of the ABPCs described herein, the first antigen-binding domain includes a heavy chain variable domain comprising SEQ ID NO: 125, and a light chain variable domain comprising SEQ ID NO: 2, SEQ ID NO: 52, SEQ ID NO: 53, SEQ ID NO: 54, SEQ ID NO: 55, SEQ ID NO: 56, SEQ ID NO: 57, SEQ ID NO: 58, SEQ ID NO: 59, SEQ ID NO: 60, SEQ ID NO: 61, SEQ ID NO: 62, SEQ ID NO: 63, SEQ ID NO: 64, SEQ ID NO: 65, SEQ ID NO: 66, SEQ ID NO: 67, SEQ ID NO: 68, SEQ ID NO: 69, SEQ ID NO: 70, SEQ ID NO: 71, SEQ ID NO: 72, SEQ ID NO: 73, SEQ ID NO: 74, SEQ ID NO: 75, SEQ ID NO: 76, SEQ ID NO: 77, SEQ ID NO: 78, SEQ ID NO: 79, SEQ ID NO: 80, SEQ ID NO: 81, SEQ ID NO: 82, or SEQ ID NO: 83.

[0258] In some examples of any of the ABPCs described herein, the first antigen-binding domain includes a heavy chain variable domain comprising SEQ ID NO: 126, and a light chain variable domain comprising SEQ ID NO: 2, SEQ ID NO: 52, SEQ ID NO: 53, SEQ ID NO: 54, SEQ ID NO: 55, SEQ ID NO: 56, SEQ ID NO: 57, SEQ ID NO: 58, SEQ ID NO: 59, SEQ ID NO: 60, SEQ ID NO: 61, SEQ ID NO: 62, SEQ ID NO: 63, SEQ ID NO: 64, SEQ ID NO: 65, SEQ ID NO: 66, SEQ ID NO: 67, SEQ ID NO: 68, SEQ ID NO: 69, SEQ ID NO: 70, SEQ ID NO: 71, SEQ ID NO: 72, SEQ ID NO: 73, SEQ ID NO: 74, SEQ ID NO: 75, SEQ ID NO: 76, SEQ ID NO: 77, SEQ ID NO: 78, SEQ ID NO: 79, SEQ ID NO: 80, SEQ ID NO: 81, SEQ ID NO: 82, or SEQ ID NO: 83.

[0259] In some examples of any of the ABPCs described herein, the first antigen-binding domain includes a heavy chain variable domain comprising SEQ ID NO: 127, and a light chain variable domain comprising SEQ ID NO: 2, SEQ ID NO: 52, SEQ ID NO: 53, SEQ ID NO: 54, SEQ ID NO: 55, SEQ ID NO: 56, SEQ ID NO: 57, SEQ ID NO: 58, SEQ ID NO: 59, SEQ ID NO: 60, SEQ ID NO: 61, SEQ ID NO: 62, SEQ ID NO: 63, SEQ ID NO: 64, SEQ ID NO: 65, SEQ ID NO: 66, SEQ ID NO: 67, SEQ ID NO: 68, SEQ ID NO: 69, SEQ ID NO: 70, SEQ ID NO: 71, SEQ ID NO: 72, SEQ ID NO: 73, SEQ ID NO: 74, SEQ ID NO: 75, SEQ ID NO: 76, SEQ ID NO: 77, SEQ ID NO: 78, SEQ ID NO: 79, SEQ ID NO: 80, SEQ ID NO: 81, SEQ ID NO: 82, or SEQ ID NO: 83.

[0260] In some examples of any of the ABPCs described herein, the first antigen-binding domain includes a heavy chain variable domain comprising SEQ ID NO: 128, and a light chain variable domain comprising SEQ ID NO: 2, SEQ ID NO: 52, SEQ ID NO: 53, SEQ ID NO: 54, SEQ ID NO: 55, SEQ ID NO: 56, SEQ ID NO: 57, SEQ ID NO: 58, SEQ ID NO: 59, SEQ ID NO: 60, SEQ ID NO: 61, SEQ ID NO: 62, SEQ ID NO: 63, SEQ ID NO: 64, SEQ ID NO: 65, SEQ ID NO: 66, SEQ ID NO: 67, SEQ ID NO: 68, SEQ ID NO: 69, SEQ ID NO: 70, SEQ ID NO: 71, SEQ ID NO: 72, SEQ ID NO: 73, SEQ ID NO: 74, SEQ ID NO: 75, SEQ ID NO: 76, SEQ ID NO: 77, SEQ ID NO: 78, SEQ ID NO: 79, SEQ ID NO: 80, SEQ ID NO: 81, SEQ ID NO: 82, or SEQ ID NO: 83.

[0261] In some examples of any of the ABPCs described herein, the first antigen-binding domain includes a heavy chain variable domain comprising SEQ ID NO: 129, and a light chain variable domain comprising SEQ ID NO: 2, SEQ ID NO: 52, SEQ ID NO: 53, SEQ ID NO: 54, SEQ ID NO: 55, SEQ ID NO: 56, SEQ ID NO: 57, SEQ ID NO: 58, SEQ ID NO: 59, SEQ ID NO: 60, SEQ ID NO: 61, SEQ ID NO: 62, SEQ ID NO: 63, SEQ ID NO: 64, SEQ ID NO: 65, SEQ ID NO: 66, SEQ ID NO: 67, SEQ ID NO: 68, SEQ ID NO: 69, SEQ ID NO: 70, SEQ ID NO: 71, SEQ ID NO: 72, SEQ ID NO: 73, SEQ ID NO: 74, SEQ ID NO: 75, SEQ ID NO: 76, SEQ ID NO: 77, SEQ ID NO: 78, SEQ ID NO: 79, SEQ ID NO: 80, SEQ ID NO: 81, SEQ ID NO: 82, or SEQ ID NO: 83.

[0262] In some examples of any of the ABPCs described herein, the first antigen-binding domain includes a heavy chain variable domain comprising SEQ ID NO: 130, and a light chain variable domain comprising SEQ ID NO: 2, SEQ ID NO: 52, SEQ ID NO: 53, SEQ ID NO: 54, SEQ ID NO: 55, SEQ ID NO: 56, SEQ ID NO: 57, SEQ ID NO: 58, SEQ ID NO: 59, SEQ ID NO: 60, SEQ ID NO: 61, SEQ ID NO: 62, SEQ ID NO: 63, SEQ ID NO: 64, SEQ ID NO: 65, SEQ ID NO: 66, SEQ ID NO: 67, SEQ ID NO: 68, SEQ ID NO: 69, SEQ ID NO: 70, SEQ ID NO: 71, SEQ ID NO: 72, SEQ ID NO: 73, SEQ ID NO: 74, SEQ ID NO: 75, SEQ ID NO: 76, SEQ ID NO: 77, SEQ ID NO: 78, SEQ ID NO: 79, SEQ ID NO: 80, SEQ ID NO: 81, SEQ ID NO: 82, or SEQ ID NO: 83.

[0263] In some examples of any of the ABPCs described herein, the first antigen-binding domain includes a heavy chain variable domain comprising SEQ ID NO: 131, and a light chain variable domain comprising SEQ ID NO: 2, SEQ ID NO: 52, SEQ ID NO: 53, SEQ ID NO: 54, SEQ ID NO: 55, SEQ ID NO: 56, SEQ ID NO: 57, SEQ ID NO: 58, SEQ ID NO: 59, SEQ ID NO: 60, SEQ ID NO: 61, SEQ ID NO: 62, SEQ ID NO: 63, SEQ ID NO: 64, SEQ ID NO: 65, SEQ ID NO: 66, SEQ ID NO: 67, SEQ ID NO: 68, SEQ ID NO: 69, SEQ ID NO: 70, SEQ ID NO: 71, SEQ ID NO: 72, SEQ ID NO: 73, SEQ ID NO: 74, SEQ ID NO: 75, SEQ ID NO: 76, SEQ ID NO: 77, SEQ ID NO: 78, SEQ ID NO: 79, SEQ ID NO: 80, SEQ ID NO: 81, SEQ ID NO: 82, or SEQ ID NO: 83.

[0264] In some examples of any of the ABPCs described herein, the first antigen-binding domain includes a heavy chain variable domain comprising SEQ ID NO: 132, and a light chain variable domain comprising SEQ ID NO: 2, SEQ ID NO: 52, SEQ ID NO: 53, SEQ ID NO: 54, SEQ ID NO: 55, SEQ ID NO: 56, SEQ ID NO: 57, SEQ ID NO: 58, SEQ ID NO: 59, SEQ ID NO: 60, SEQ ID NO: 61, SEQ ID NO: 62, SEQ ID NO: 63, SEQ ID NO: 64, SEQ ID NO: 65, SEQ ID NO: 66, SEQ ID NO: 67, SEQ ID NO: 68, SEQ ID NO: 69, SEQ ID NO: 70, SEQ ID NO: 71, SEQ ID NO: 72, SEQ ID NO: 73, SEQ ID NO: 74, SEQ ID NO: 75, SEQ ID NO: 76, SEQ ID NO: 77, SEQ ID NO: 78, SEQ ID NO: 79, SEQ ID NO: 80, SEQ ID NO: 81, SEQ ID NO: 82, or SEQ ID NO: 83.

[0265] In some examples of any of the ABPCs described herein, the first antigen-binding domain includes a heavy chain variable domain comprising SEQ ID NO: 133, and a light chain variable domain comprising SEQ ID NO: 2, SEQ ID NO: 52, SEQ ID NO: 53, SEQ ID NO: 54, SEQ ID NO: 55, SEQ ID NO: 56, SEQ ID NO: 57, SEQ ID NO: 58, SEQ ID NO: 59, SEQ ID NO: 60, SEQ ID NO: 61, SEQ ID NO: 62, SEQ ID NO: 63, SEQ ID NO: 64, SEQ ID NO: 65, SEQ ID NO: 66, SEQ ID NO: 67, SEQ ID NO: 68, SEQ ID NO: 69, SEQ ID NO: 70, SEQ ID NO: 71, SEQ ID NO: 72, SEQ ID NO: 73, SEQ ID NO: 74, SEQ ID NO: 75, SEQ ID NO: 76, SEQ ID NO: 77, SEQ ID NO: 78, SEQ ID NO: 79, SEQ ID NO: 80, SEQ ID NO: 81, SEQ ID NO: 82, or SEQ ID NO: 83.

[0266] In some examples of any of the ABPCs described herein, the first antigen-binding domain includes a heavy chain variable domain comprising SEQ ID NO: 134, and a light chain variable domain comprising SEQ ID NO: 2, SEQ ID NO: 52, SEQ ID NO: 53, SEQ ID NO: 54, SEQ ID NO: 55, SEQ ID NO: 56, SEQ ID NO: 57, SEQ ID NO: 58, SEQ ID NO: 59, SEQ ID NO: 60, SEQ ID NO: 61, SEQ ID NO: 62, SEQ ID NO: 63, SEQ ID NO: 64, SEQ ID NO: 65, SEQ ID NO: 66, SEQ ID NO: 67, SEQ ID NO: 68, SEQ ID NO: 69, SEQ ID NO: 70, SEQ ID NO: 71, SEQ ID NO: 72, SEQ ID NO: 73, SEQ ID NO: 74, SEQ ID NO: 75, SEQ ID NO: 76, SEQ ID NO: 77, SEQ ID NO: 78, SEQ ID NO: 79, SEQ ID NO: 80, SEQ ID NO: 81, SEQ ID NO: 82, or SEQ ID NO: 83.

[0267] In some examples of any of the ABPCs described herein, the first antigen-binding domain includes a heavy chain variable domain comprising SEQ ID NO: 135, and a light chain variable domain comprising SEQ ID NO: 2, SEQ ID NO: 52, SEQ ID NO: 53, SEQ ID NO: 54, SEQ ID NO: 55, SEQ ID NO: 56, SEQ ID NO: 57, SEQ ID NO: 58, SEQ ID NO: 59, SEQ ID NO: 60, SEQ ID NO: 61, SEQ ID NO: 62, SEQ ID NO: 63, SEQ ID NO: 64, SEQ ID NO: 65, SEQ ID NO: 66, SEQ ID NO: 67, SEQ ID NO: 68, SEQ ID NO: 69, SEQ ID NO: 70, SEQ ID NO: 71, SEQ ID NO: 72, SEQ ID NO: 73, SEQ ID NO: 74, SEQ ID NO: 75, SEQ ID NO: 76, SEQ ID NO: 77, SEQ ID NO: 78, SEQ ID NO: 79, SEQ ID NO: 80, SEQ ID NO: 81, SEQ ID NO: 82, or SEQ ID NO: 83.

[0268] In some examples of any of the ABPCs described herein, the first antigen-binding domain includes a heavy chain variable domain comprising SEQ ID NO: 136, and a light chain variable domain comprising SEQ ID NO: 2, SEQ ID NO: 52, SEQ ID NO: 53, SEQ ID NO: 54, SEQ ID NO: 55, SEQ ID NO: 56, SEQ ID NO: 57, SEQ ID NO: 58, SEQ ID NO: 59, SEQ ID NO: 60, SEQ ID NO: 61, SEQ ID NO: 62, SEQ ID NO: 63, SEQ ID NO: 64, SEQ ID NO: 65, SEQ ID NO: 66, SEQ ID NO: 67, SEQ ID NO: 68, SEQ ID NO: 69, SEQ ID NO: 70, SEQ ID NO: 71, SEQ ID NO: 72, SEQ ID NO: 73, SEQ ID NO: 74, SEQ ID NO: 75, SEQ ID NO: 76, SEQ ID NO: 77, SEQ ID NO: 78, SEQ ID NO: 79, SEQ ID NO: 80, SEQ ID NO: 81, SEQ ID NO: 82, or SEQ ID NO: 83.

[0269] In some examples of any of the ABPCs described herein, the first antigen-binding domain includes a heavy chain variable domain comprising SEQ ID NO: 137, and a light chain variable domain comprising SEQ ID NO: 2, SEQ ID NO: 52, SEQ ID NO: 53, SEQ ID NO: 54, SEQ ID NO: 55, SEQ ID NO: 56, SEQ ID NO: 57, SEQ ID NO: 58, SEQ ID NO: 59, SEQ ID NO: 60, SEQ ID NO: 61, SEQ ID NO: 62, SEQ ID NO: 63, SEQ ID NO: 64, SEQ ID NO: 65, SEQ ID NO: 66, SEQ ID NO: 67, SEQ ID NO: 68, SEQ ID NO: 69, SEQ ID NO: 70, SEQ ID NO: 71, SEQ ID NO: 72, SEQ ID NO: 73, SEQ ID NO: 74, SEQ ID NO: 75, SEQ ID NO: 76, SEQ ID NO: 77, SEQ ID NO: 78, SEQ ID NO: 79, SEQ ID NO: 80, SEQ ID NO: 81, SEQ ID NO: 82, or SEQ ID NO: 83.

[0270] In some examples of any of the ABPCs described herein, the first antigen-binding domain includes a heavy chain variable domain comprising SEQ ID NO: 138, and a light chain variable domain comprising SEQ ID NO: 2, SEQ ID NO: 52, SEQ ID NO: 53, SEQ ID NO: 54, SEQ ID NO: 55, SEQ ID NO: 56, SEQ ID NO: 57, SEQ ID NO: 58, SEQ ID NO: 59, SEQ ID NO: 60, SEQ ID NO: 61, SEQ ID NO: 62, SEQ ID NO: 63, SEQ ID NO: 64, SEQ ID NO: 65, SEQ ID NO: 66, SEQ ID NO: 67, SEQ ID NO: 68, SEQ ID NO: 69, SEQ ID NO: 70, SEQ ID NO: 71, SEQ ID NO: 72, SEQ ID NO: 73, SEQ ID NO: 74, SEQ ID NO: 75, SEQ ID NO: 76, SEQ ID NO: 77, SEQ ID NO: 78, SEQ ID NO: 79, SEQ ID NO: 80, SEQ ID NO: 81, SEQ ID NO: 82, or SEQ ID NO: 83.

[0271] In some examples of any of the ABPCs described herein, the first antigen-binding domain includes a light chain variable domain of SEQ ID NO: 139, SEQ ID NO: 140, SEQ ID NO: 141, or SEQ ID NO: 142.

[0272] In some examples of any of the ABPCs described herein, the first antigen-binding domain includes a light chain variable domain comprising SEQ ID NO: 139, and a heavy chain variable domain comprising SEQ ID NO: 1, SEQ ID NO: 13, SEQ ID NO: 14, SEQ ID NO: 15, SEQ ID NO: 16, SEQ ID NO: 17, SEQ ID NO: 18, SEQ ID NO: 19, SEQ ID NO: 20, SEQ ID NO: 21, SEQ ID NO: 22, SEQ ID NO: 23, SEQ ID NO: 24, SEQ ID NO: 25, SEQ ID NO: 26, SEQ ID NO: 27, SEQ ID NO: 28, SEQ ID NO: 29, SEQ ID NO: 30, SEQ ID NO: 31, SEQ ID NO: 32, SEQ ID NO: 33, SEQ ID NO: 34, SEQ ID NO: 35, SEQ ID NO: 36, SEQ ID NO: 37, SEQ ID NO: 38, SEQ ID NO: 39, SEQ ID NO: 40, SEQ ID NO: 41, SEQ ID NO: 42, SEQ ID NO: 43, SEQ ID NO: 44, SEQ ID NO: 45, SEQ ID NO: 46, SEQ ID NO: 47, SEQ ID NO: 48, SEQ ID NO: 49, SEQ ID NO: 50, SEQ ID NO: 51, SEQ ID NO: 84, SEQ ID NO: 85, SEQ ID NO: 86, SEQ ID NO: 87, SEQ ID NO: 88, SEQ ID NO: 89, SEQ ID NO: 90, SEQ ID NO: 91, SEQ ID NO: 92, SEQ ID NO: 93, SEQ ID NO: 94, SEQ ID NO: 95, SEQ ID NO: 96, SEQ ID NO: 97, SEQ ID NO: 98, SEQ ID NO: 99, SEQ ID NO: 100, SEQ ID NO: 101, SEQ ID NO: 102, SEQ ID NO: 103, SEQ ID NO: 104, SEQ ID NO: 105, SEQ ID NO: 106, SEQ ID NO: 107, SEQ ID NO: 108, SEQ ID NO: 109, SEQ ID NO: 110, SEQ ID NO: 111, SEQ ID NO: 112, SEQ ID NO: 113, SEQ ID NO: 114, SEQ ID NO: 115, SEQ ID NO: 116, SEQ ID NO: 117, SEQ ID NO: 118, SEQ ID NO: 119, SEQ ID NO: 120, SEQ ID NO: 121, SEQ ID NO: 122, SEQ ID NO: 123, SEQ ID NO: 124, SEQ ID NO: 125, SEQ ID NO: 126, SEQ ID NO: 127, SEQ ID NO: 128, SEQ ID NO: 129, SEQ ID NO: 130, SEQ ID NO: 131, SEQ ID NO: 132, SEQ ID NO: 133, SEQ ID NO: 134, SEQ ID NO: 135, SEQ ID NO: 136, SEQ ID NO: 137 or SEQ ID NO: 138.

[0273] In some examples of any of the ABPCs described herein, the first antigen-binding domain includes a light chain variable domain comprising SEQ ID NO: 140, and a heavy chain variable domain comprising SEQ ID NO: 1, SEQ ID NO: 13, SEQ ID NO: 14, SEQ ID NO: 15, SEQ ID NO: 16, SEQ ID NO: 17, SEQ ID NO: 18, SEQ ID NO: 19, SEQ ID NO: 20, SEQ ID NO: 21, SEQ ID NO: 22, SEQ ID NO: 23, SEQ ID NO: 24, SEQ ID NO: 25, SEQ ID NO: 26, SEQ ID NO: 27, SEQ ID NO: 28, SEQ ID NO: 29, SEQ ID NO: 30, SEQ ID NO: 31, SEQ ID NO: 32, SEQ ID NO: 33, SEQ ID NO: 34, SEQ ID NO: 35, SEQ ID NO: 36, SEQ ID NO: 37, SEQ ID NO: 38, SEQ ID NO: 39, SEQ ID NO: 40, SEQ ID NO: 41, SEQ ID NO: 42, SEQ ID NO: 43, SEQ ID NO: 44, SEQ ID NO: 45, SEQ ID NO: 46, SEQ ID NO: 47, SEQ ID NO: 48, SEQ ID NO: 49, SEQ ID NO: 50, SEQ ID NO: 51, SEQ ID NO: 84, SEQ ID NO: 85, SEQ ID NO: 86, SEQ ID NO: 87, SEQ ID NO: 88, SEQ ID NO: 89, SEQ ID NO: 90, SEQ ID NO: 91, SEQ ID NO: 92, SEQ ID NO: 93, SEQ ID NO: 94, SEQ ID NO: 95, SEQ ID NO: 96, SEQ ID NO: 97, SEQ ID NO: 98, SEQ ID NO: 99, SEQ ID NO: 100, SEQ ID NO: 101, SEQ ID NO: 102, SEQ ID NO: 103, SEQ ID NO: 104, SEQ ID NO: 105, SEQ ID NO: 106, SEQ ID NO: 107, SEQ ID NO: 108, SEQ ID NO: 109, SEQ ID NO: 110, SEQ ID NO: 111, SEQ ID NO: 112, SEQ ID NO: 113, SEQ ID NO: 114, SEQ ID NO: 115, SEQ ID NO: 116, SEQ ID NO: 117, SEQ ID NO: 118, SEQ ID NO: 119, SEQ ID NO: 120, SEQ ID NO: 121, SEQ ID NO: 122, SEQ ID NO: 123, SEQ ID NO: 124, SEQ ID NO: 125, SEQ ID NO: 126, SEQ ID NO: 127, SEQ ID NO: 128, SEQ ID NO: 129, SEQ ID NO: 130, SEQ ID NO: 131, SEQ ID NO: 132, SEQ ID NO: 133, SEQ ID NO: 134, SEQ ID NO: 135, SEQ ID NO: 136, SEQ ID NO: 137 or SEQ ID NO: 138.

[0274] In some examples of any of the ABPCs described herein, the first antigen-binding domain includes a light chain variable domain comprising SEQ ID NO: 141, and a heavy chain variable domain comprising SEQ ID NO: 1, SEQ ID NO: 13, SEQ ID NO: 14, SEQ ID NO: 15, SEQ ID NO: 16, SEQ ID NO: 17, SEQ ID NO: 18, SEQ ID NO: 19, SEQ ID NO: 20, SEQ ID NO: 21, SEQ ID NO: 22, SEQ ID NO: 23, SEQ ID NO: 24, SEQ ID NO: 25, SEQ ID NO: 26, SEQ ID NO: 27, SEQ ID NO: 28, SEQ ID NO: 29, SEQ ID NO: 30, SEQ ID NO: 31, SEQ ID NO: 32, SEQ ID NO: 33, SEQ ID NO: 34, SEQ ID NO: 35, SEQ ID NO: 36, SEQ ID NO: 37, SEQ ID NO: 38, SEQ ID NO: 39, SEQ ID NO: 40, SEQ ID NO: 41, SEQ ID NO: 42, SEQ ID NO: 43, SEQ ID NO: 44, SEQ ID NO: 45, SEQ ID NO: 46, SEQ ID NO: 47, SEQ ID NO: 48, SEQ ID NO: 49, SEQ ID NO: 50, SEQ ID NO: 51, SEQ ID NO: 84, SEQ ID NO: 85, SEQ ID NO: 86, SEQ ID NO: 87, SEQ ID NO: 88, SEQ ID NO: 89, SEQ ID NO: 90, SEQ ID NO: 91, SEQ ID NO: 92, SEQ ID NO: 93, SEQ ID NO: 94, SEQ ID NO: 95, SEQ ID NO: 96, SEQ ID NO: 97, SEQ ID NO: 98, SEQ ID NO: 99, SEQ ID NO: 100, SEQ ID NO: 101, SEQ ID NO: 102, SEQ ID NO: 103, SEQ ID NO: 104, SEQ ID NO: 105, SEQ ID NO: 106, SEQ ID NO: 107, SEQ ID NO: 108, SEQ ID NO: 109, SEQ ID NO: 110, SEQ ID NO: 111, SEQ ID NO: 112, SEQ ID NO: 113, SEQ ID NO: 114, SEQ ID NO: 115, SEQ ID NO: 116, SEQ ID NO: 117, SEQ ID NO: 118, SEQ ID NO: 119, SEQ ID NO: 120, SEQ ID NO: 121, SEQ ID NO: 122, SEQ ID NO: 123, SEQ ID NO: 124, SEQ ID NO: 125, SEQ ID NO: 126, SEQ ID NO: 127, SEQ ID NO: 128, SEQ ID NO: 129, SEQ ID NO: 130, SEQ ID NO: 131, SEQ ID NO: 132, SEQ ID NO: 133, SEQ ID NO: 134, SEQ ID NO: 135, SEQ ID NO: 136, SEQ ID NO: 137 or SEQ ID NO: 138.

[0275] In some examples of any of the ABPCs described herein, the first antigen-binding domain includes a light chain variable domain comprising SEQ ID NO: 142, and a heavy chain variable domain comprising SEQ ID NO: 1, SEQ ID NO: 13, SEQ ID NO: 14, SEQ ID NO: 15, SEQ ID NO: 16, SEQ ID NO: 17, SEQ ID NO: 18, SEQ ID NO: 19, SEQ ID NO: 20, SEQ ID NO: 21, SEQ ID NO: 22, SEQ ID NO: 23, SEQ ID NO: 24, SEQ ID NO: 25, SEQ ID NO: 26, SEQ ID NO: 27, SEQ ID NO: 28, SEQ ID NO: 29, SEQ ID NO: 30, SEQ ID NO: 31, SEQ ID NO: 32, SEQ ID NO: 33, SEQ ID NO: 34, SEQ ID NO: 35, SEQ ID NO: 36, SEQ ID NO: 37, SEQ ID NO: 38, SEQ ID NO: 39, SEQ ID NO: 40, SEQ ID NO: 41, SEQ ID NO: 42, SEQ ID NO: 43, SEQ ID NO: 44, SEQ ID NO: 45, SEQ ID NO: 46, SEQ ID NO: 47, SEQ ID NO: 48, SEQ ID NO: 49, SEQ ID NO: 50, SEQ ID NO: 51, SEQ ID NO: 84, SEQ ID NO: 85, SEQ ID NO: 86, SEQ ID NO: 87, SEQ ID NO: 88, SEQ ID NO: 89, SEQ ID NO: 90, SEQ ID NO: 91, SEQ ID NO: 92, SEQ ID NO: 93, SEQ ID NO: 94, SEQ ID NO: 95, SEQ ID NO: 96, SEQ ID NO: 97, SEQ ID NO: 98, SEQ ID NO: 99, SEQ ID NO: 100, SEQ ID NO: 101, SEQ ID NO: 102, SEQ ID NO: 103, SEQ ID NO: 104, SEQ ID NO: 105, SEQ ID NO: 106, SEQ ID NO: 107, SEQ ID NO: 108, SEQ ID NO: 109, SEQ ID NO: 110, SEQ ID NO: 111, SEQ ID NO: 112, SEQ ID NO: 113, SEQ ID NO: 114, SEQ ID NO: 115, SEQ ID NO: 116, SEQ ID NO: 117, SEQ ID NO: 118, SEQ ID NO: 119, SEQ ID NO: 120, SEQ ID NO: 121, SEQ ID NO: 122, SEQ ID NO: 123, SEQ ID NO: 124, SEQ ID NO: 125, SEQ ID NO: 126, SEQ ID NO: 127, SEQ ID NO: 128, SEQ ID NO: 129, SEQ ID NO: 130, SEQ ID NO: 131, SEQ ID NO: 132, SEQ ID NO: 133, SEQ ID NO: 134, SEQ ID NO: 135, SEQ ID NO: 136, SEQ ID NO: 137 or SEQ ID NO: 138.

[0276] In some examples of any of the ABPCs described herein, the first antigen-binding domain includes a heavy chain variable domain of pinatuzumab with one or more (e.g., one, two, three, four, five, six, seven, eight, nine, ten, eleven, twelve, thirteen, fourteen, fifteen, sixteen, seventeen, eighteen, nineteen, or twenty) amino acids substituted with a histidine. In some examples of any of the ABPCs described herein, the first antigen-binding domain includes a light chain variable domain of pinatuzumab with one or more (e.g., one, two, three, four, five, six, seven, eight, nine, ten, eleven, twelve, thirteen, fourteen, fifteen, sixteen, seventeen, eighteen, nineteen, or twenty) amino acids substituted with a histidine. In some examples of any of the ABPCs described herein, the first antigen-binding domain includes a heavy chain variable domain of pinatuzumab with one or more (e.g., one, two, three, four, five, six, seven, eight, nine, ten, eleven, twelve, thirteen, fourteen, fifteen, sixteen, seventeen, eighteen, nineteen, or twenty) amino acids substituted with a histidine; and a light chain variable domain of pinatuzumab with one or more (e.g., one, two, three, four, five, six, seven, eight, nine, ten, eleven, twelve, thirteen, fourteen, fifteen, sixteen, seventeen, eighteen, nineteen, or twenty) amino acids substituted with a histidine. In some examples of any of the ABPCs described herein, the heavy chain variable domain of pinatuzumab comprises SEQ ID NO: 143. In some examples of any of the ABPCs described herein, the light chain variable domain of pinatuzumab comprises SEQ ID NO: 144.

[0277] In some examples of any of the ABPCs described herein, the first antigen-binding domain comprises a heavy chain variable domain comprising a CDR1, a CDR2, and a CDR3 of SEQ ID NO: 145, SEQ ID NO: 146, and SEQ ID NO: 147, respectively, with collectively a total of one or more (e.g., one, two, three, four, five, six, seven, eight, nine, or ten) amino acid positions in SEQ ID NOs: 145-147 substituted with a histidine. In some examples of any of the ABPCs described herein, the first antigen-binding domain comprises a light chain variable domain comprising a CDR1, a CDR2, and a CDR3 of SEQ ID NO: 148, SEQ ID NO: 149, and SEQ ID NO: 150, respectively, with collectively a total of one or more (e.g., one, two, three, four, five, six, seven, eight, nine, or ten) amino acid positions in SEQ ID NOs: 148-150 substituted with a histidine. In some examples of any of the ABPCs described herein, the first antigen-binding domain includes: a heavy chain variable domain comprising a CDR1, a CDR2, and a CDR3 of SEQ ID NO: 145, SEQ ID NO: 146, and SEQ ID NO: 147, respectively, with collectively a total of one or more (e.g., one, two, three, four, five, six, seven, eight, nine, or ten) amino acid positions in SEQ ID NOs: 145-147 substituted with a histidine; and a light chain variable domain comprising a CDR1, a CDR2, and a CDR3 of SEQ ID NO: 148, SEQ ID NO: 149, and SEQ ID NO: 150, respectively, with collectively a total of one or more (e.g., one, two, three, four, five, six, seven, eight, nine, or ten) amino acid positions in SEQ ID NOs: 148-150 substituted with a histidine.

[0278] In some examples of any of the ABPCs described herein, the first antigen-binding domain includes a heavy chain variable domain that is at least 90% (e.g., at least 92%, at least 94%, at least 96%, at least 98%, at least 99%, or 100%) identical to SEQ ID NO: 143, where the heavy chain variable domain includes a histidine at one or more (e.g., one, two, three, four, five, six, seven, eight, nine, ten, eleven, twelve, thirteen, fourteen, fifteen, sixteen, seventeen, eighteen, nineteen, or twenty) amino acid positions in SEQ ID NO: 143 selected from the group consisting of: 27, 28, 31, 34, 35, 50, 53, 55, 57, 59, 98, 101, 102, 104, 106, 107, and 108. In some examples of any of the ABPCs described herein, the first antigen-binding domain includes a light chain variable domain that is at least 90% (e.g., at least 92%, at least 94%, at least 96%, at least 98%, at least 99%, or 100%) identical to SEQ ID NO: 144, where the light chain variable domain includes a histidine at one or more (e.g., one, two, three, four, five, six, seven, eight, nine, ten, eleven, twelve, thirteen, fourteen, fifteen, sixteen, seventeen, eighteen, nineteen, or twenty) amino acid positions in SEQ ID NO: 144 selected from the group consisting of: 25, 29, 30, 36, 37, 38, 39, 55, 94, 95, 97, 99, 100, 101, and 102. In some examples of any of the ABPCs described herein the first antigen-binding domain includes: a heavy chain variable domain that is at least 90% (e.g., at least 92%, at least 94%, at least 96%, at least 98%, at least 99%, or 100%) identical to SEQ ID NO: 143, where the heavy chain variable domain includes a histidine at one or more (e.g., one, two, three, four, five, six, seven, eight, nine, ten, eleven, twelve, thirteen, fourteen, fifteen, sixteen, seventeen, eighteen, nineteen, or twenty) amino acid positions in SEQ ID NO: 143 selected from the group consisting of: 27, 28, 31, 34, 35, 50, 53, 55, 57, 59, 98, 101, 102, 104, 106, 107, and 108, and a light chain variable domain that is at least 90% (e.g., at least 92%, at least 94%, at least 96%, at least 98%, at least 99%, or 100%) identical to SEQ ID NO: 144, where the light chain variable domain includes a histidine at one or more (e.g., one, two, three, four, five, six, seven, eight, nine, ten, eleven, twelve, thirteen, fourteen, fifteen, sixteen, seventeen, eighteen, nineteen, or twenty) amino acid positions in SEQ ID NO: 144 selected from the group consisting of: 25, 29, 30, 36, 37, 38, 39, 55, 94, 95, 97, 99, 100, 101, and 102.

[0279] In some examples of any of the ABPCs described herein, a heavy chain variable domain includes a heavy chain variable domain that is at least 90% (e.g., at least 92%, at least 94%, at least 96%, at least 98%, at least 99%, or 100%) identical to SEQ ID NO: 143, where the heavy chain variable domain includes a histidine at any of the specific combinations of one or more amino acid positions in SEQ ID NO: 143 listed in Table 3.

TABLE 3
Exemplary Combinations of Amino Acid Positions in
SEQ ID NO: 1 that can be Substituted with Histidine

27 + 28, 27 + 31, 27 + 34, 27 + 35, 27 + 50, 27 + 53, 27 + 55, 27 + 57, 27 + 59, 27 +
98, 27 + 101, 27 + 102, 27 + 104, 27 + 106, 27 + 107, 27 + 108, 28 + 31, 28 + 34, 28 +
35, 28 + 50, 28 + 53, 28 + 55, 28 + 57, 28 + 59, 28 + 98, 28 + 101, 28 + 102, 28 +
104, 28 + 106, 28 + 107, 28 + 108, 31 + 34, 31 + 35, 31 + 50, 31 + 53, 31 + 55, 31 +
57, 31 + 59, 31 + 98, 31 + 101, 31 + 102, 31 + 104, 31 + 106, 31 + 107, 31 + 108, 34 +
35, 34 + 50, 34 + 53, 34 + 55, 34 + 57, 34 + 59, 34 + 98, 34 + 101, 34 + 102, 34 +
104, 34 + 106, 34 + 107, 34 + 108, 35 + 50, 35 + 53, 35 + 55, 35 + 57, 35 + 59, 35 +
98, 35 + 101, 35 + 102, 35 + 104, 35 + 106, 35 + 107, 35 + 108, 50 + 53, 50 + 55, 50 +
57, 50 + 59, 50 + 98, 50 + 101, 50 + 102, 50 + 104, 50 + 106, 50 + 107, 50 + 108,
53 + 55, 53 + 57, 53 + 59, 53 + 98, 53 + 101, 53 + 102, 53 + 104, 53 + 106, 53 + 107,
53 + 108, 55 + 57, 55 + 59, 55 + 98, 55 + 101, 55 + 102, 55 + 104, 55 + 106, 55 +
107, 55 + 108, 57 + 59, 57 + 98, 57 + 101, 57 + 102, 57 + 104, 57 + 106, 57 + 107,
57 + 108, 59 + 98, 59 + 101, 59 + 102, 59 + 104, 59 + 106, 59 + 107, 59 + 108, 98 +
101, 98 + 102, 98 + 104, 98 + 106, 98 + 107, 98 + 108, 101 + 102, 101 + 104, 101 +
106, 101 + 107, 101 + 108, 102 + 104, 102 + 106, 102 + 107, 102 + 108, 104 + 106,
104 + 107, 104 + 108, 106 + 107, 106 + 108, 107 + 108, 27 + 28 + 31, 27 + 28 + 34,
27 + 28 + 35, 27 + 28 + 50, 27 + 28 + 53, 27 + 28 + 55, 27 + 28 + 57, 27 + 28 + 59, 27 +
28 + 98, 27 + 28 + 101, 27 + 28 + 102, 27 + 28 + 104, 27 + 28 + 106, 27 + 28 + 107,
27 + 28 + 108, 27 + 31 + 34, 27 + 31 + 35, 27 + 31 + 50, 27 + 31 + 53, 27 + 31 + 55,
27 + 31 + 57, 27 + 31 + 59, 27 + 31 + 98, 27 + 31 + 101, 27 + 31 + 102, 27 + 31 + 104,
27 + 31 + 106, 27 + 31 + 107, 27 + 31 + 108, 27 + 34 + 35, 27 + 34 + 50, 27 + 34 + 53,
27 + 34 + 55, 27 + 34 + 57, 27 + 34 + 59, 27 + 34 + 98, 27 + 34 + 101, 27 + 34 + 102,
27 + 34 + 104, 27 + 34 + 106, 27 + 34 + 107, 27 + 34 + 108, 27 + 35 + 50, 27 + 35 +
53, 27 + 35 + 55, 27 + 35 + 57, 27 + 35 + 59, 27 + 35 + 98, 27 + 35 + 101, 27 + 35 +
102, 27 + 35 + 104, 27 + 35 + 106, 27 + 35 + 107, 27 + 35 + 108, 27 + 50 + 53, 27 +
50 + 55, 27 + 50 + 57, 27 + 50 + 59, 27 + 50 + 98, 27 + 50 + 101, 27 + 50 + 102, 27 +
50 + 104, 27 + 50 + 106, 27 + 50 + 107, 27 + 50 + 108, 27 + 53 + 55, 27 + 53 + 57, 27 +
53 + 59, 27 + 53 + 98, 27 + 53 + 101, 27 + 53 + 102, 27 + 53 + 104, 27 + 53 + 106,
27 + 53 + 107, 27 + 53 + 108, 27 + 55 + 57, 27 + 55 + 59, 27 + 55 + 98, 27 + 55 + 101,
27 + 55 + 102, 27 + 55 + 104, 27 + 55 + 106, 27 + 55 + 107, 27 + 55 + 108, 27 + 57 +
59, 27 + 57 + 98, 27 + 57 + 101, 27 + 57 + 102, 27 + 57 + 104, 27 + 57 + 106, 27 + 57 +
107, 27 + 57 + 108, 27 + 59 + 98, 27 + 59 + 101, 27 + 59 + 102, 27 + 59 + 104, 27 +
59 + 106, 27 + 59 + 107, 27 + 59 + 108, 27 + 98 + 101, 27 + 98 + 102, 27 + 98 + 104,
27 + 98 + 106, 27 + 98 + 107, 27 + 98 + 108, 27 + 101 + 102, 27 + 101 + 104, 27 + 101 +
106, 27 + 101 + 107, 27 + 101 + 108, 27 + 102 + 104, 27 + 102 + 106, 27 + 102 +
107, 27 + 102 + 108, 27 + 104 + 106, 27 + 104 + 107, 27 + 104 + 108, 27 + 106 + 107,
27 + 106 + 108, 27 + 107 + 108, 28 + 31 + 34, 28 + 31 + 35, 28 + 31 + 50, 28 + 31 +
53, 28 + 31 + 55, 28 + 31 + 57, 28 + 31 + 59, 28 + 31 + 98, 28 + 31 + 101, 28 + 31 +
102, 28 + 31 + 104, 28 + 31 + 106, 28 + 31 + 107, 28 + 31 + 108, 28 + 34 + 35, 28 +
34 + 50, 28 + 34 + 53, 28 + 34 + 55, 28 + 34 + 57, 28 + 34 + 59, 28 + 34 + 98, 28 + 34 +
101, 28 + 34 + 102, 28 + 34 + 104, 28 + 34 + 106, 28 + 34 + 107, 28 + 34 + 108, 28 +
35 + 50, 28 + 35 + 53, 28 + 35 + 55, 28 + 35 + 57, 28 + 35 + 59, 28 + 35 + 98, 28 +
35 + 101, 28 + 35 + 102, 28 + 35 + 104, 28 + 35 + 106, 28 + 35 + 107, 28 + 35 + 108,
28 + 50 + 53, 28 + 50 + 55, 28 + 50 + 57, 28 + 50 + 59, 28 + 50 + 98, 28 + 50 + 101,
28 + 50 + 102, 28 + 50 + 104, 28 + 50 + 106, 28 + 50 + 107, 28 + 50 + 108, 28 + 53 +
55, 28 + 53 + 57, 28 + 53 + 59, 28 + 53 + 98, 28 + 53 + 101, 28 + 53 + 102, 28 + 53 +
104, 28 + 53 + 106, 28 + 53 + 107, 28 + 53 + 108, 28 + 55 + 57, 28 + 55 + 59, 28 + 55 +
98, 28 + 55 + 101, 28 + 55 + 102, 28 + 55 + 104, 28 + 55 + 106, 28 + 55 + 107, 28 +
55 + 108, 28 + 57 + 59, 28 + 57 + 98, 28 + 57 + 101, 28 + 57 + 102, 28 + 57 + 104, 28 +
57 + 106, 28 + 57 + 107, 28 + 57 + 108, 28 + 59 + 98, 28 + 59 + 101, 28 + 59 + 102,
28 + 59 + 104, 28 + 59 + 106, 28 + 59 + 107, 28 + 59 + 108, 28 + 98 + 101, 28 + 98 +
102, 28 + 98 + 104, 28 + 98 + 106, 28 + 98 + 107, 28 + 98 + 108, 28 + 101 + 102, 28 +
101 + 104, 28 + 101 + 106, 28 + 101 + 107, 28 + 101 + 108, 28 + 102 + 104, 28 + 102 +
106, 28 + 102 + 107, 28 + 102 + 108, 28 + 104 + 106, 28 + 104 + 107, 28 + 104 +
108, 28 + 106 + 107, 28 + 106 + 108, 28 + 107 + 108, 31 + 34 + 35, 31 + 34 + 50, 31 +
34 + 53, 31 + 34 + 55, 31 + 34 + 57, 31 + 34 + 59, 31 + 34 + 98, 31 + 34 + 101, 31 +
34 + 102, 31 + 34 + 104, 31 + 34 + 106, 31 + 34 + 107, 31 + 34 + 108, 31 + 35 + 50,
31 + 35 + 53, 31 + 35 + 55, 31 + 35 + 57, 31 + 35 + 59, 31 + 35 + 98, 31 + 35 + 101,
31 + 35 + 102, 31 + 35 + 104, 31 + 35 + 106, 31 + 35 + 107, 31 + 35 + 108, 31 + 50 +
53, 31 + 50 + 55, 31 + 50 + 57, 31 + 50 + 59, 31 + 50 + 98, 31 + 50 + 101, 31 + 50 +
102, 31 + 50 + 104, 31 + 50 + 106, 31 + 50 + 107, 31 + 50 + 108, 31 + 53 + 55, 31 +
53 + 57, 31 + 53 + 59, 31 + 53 + 98, 31 + 53 + 101, 31 + 53 + 102, 31 + 53 + 104, 31 +
53 + 106, 31 + 53 + 107, 31 + 53 + 108, 31 + 55 + 57, 31 + 55 + 59, 31 + 55 + 98, 31 +
55 + 101, 31 + 55 + 102, 31 + 55 + 104, 31 + 55 + 106, 31 + 55 + 107, 31 + 55 + 108,
31 + 57 + 59, 31 + 57 + 98, 31 + 57 + 101, 31 + 57 + 102, 31 + 57 + 104, 31 + 57 +
106, 31 + 57 + 107, 31 + 57 + 108, 31 + 59 + 98, 31 + 59 + 101, 31 + 59 + 102, 31 +
59 + 104, 31 + 59 + 106, 31 + 59 + 107, 31 + 59 + 108, 31 + 98 + 101, 31 + 98 + 102,
31 + 98 + 104, 31 + 98 + 106, 31 + 98 + 107, 31 + 98 + 108, 31 + 101 + 102, 31 + 101 +
104, 31 + 101 + 106, 31 + 101 + 107, 31 + 101 + 108, 31 + 102 + 104, 31 + 102 +
106, 31 + 102 + 107, 31 + 102 + 108, 31 + 104 + 106, 31 + 104 + 107, 31 + 104 + 108,
31 + 106 + 107, 31 + 106 + 108, 31 + 107 + 108, 34 + 35 + 50, 34 + 35 + 53, 34 + 35 +
55, 34 + 35 + 57, 34 + 35 + 59, 34 + 35 + 98, 34 + 35 + 101, 34 + 35 + 102, 34 + 35 +
104, 34 + 35 + 106, 34 + 35 + 107, 34 + 35 + 108, 34 + 50 + 53, 34 + 50 + 55, 34 + 50 +
57, 34 + 50 + 59, 34 + 50 + 98, 34 + 50 + 101, 34 + 50 + 102, 34 + 50 + 104, 34 + 50 +
106, 34 + 50 + 107, 34 + 50 + 108, 34 + 53 + 55, 34 + 53 + 57, 34 + 53 + 59, 34 + 53 +
98, 34 + 53 + 101, 34 + 53 + 102, 34 + 53 + 104, 34 + 53 + 106, 34 + 53 + 107, 34 +
53 + 108, 34 + 55 + 57, 34 + 55 + 59, 34 + 55 + 98, 34 + 55 + 101, 34 + 55 + 102, 34 +
55 + 104, 34 + 55 + 106, 34 + 55 + 107, 34 + 55 + 108, 34 + 57 + 59, 34 + 57 + 98, 34 +
57 + 101, 34 + 57 + 102, 34 + 57 + 104, 34 + 57 + 106, 34 + 57 + 107, 34 + 57 + 108,
34 + 59 + 98, 34 + 59 + 101, 34 + 59 + 102, 34 + 59 + 104, 34 + 59 + 106, 34 + 59 +
107, 34 + 59 + 108, 34 + 98 + 101, 34 + 98 + 102, 34 + 98 + 104, 34 + 98 + 106, 34 +
98 + 107, 34 + 98 + 108, 34 + 101 + 102, 34 + 101 + 104, 34 + 101 + 106, 34 + 101 +
107, 34 + 101 + 108, 34 + 102 + 104, 34 + 102 + 106, 34 + 102 + 107, 34 + 102 + 108,
34 + 104 + 106, 34 + 104 + 107, 34 + 104 + 108, 34 + 106 + 107, 34 + 106 + 108, 34 +
107 + 108, 35 + 50 + 53, 35 + 50 + 55, 35 + 50 + 57, 35 + 50 + 59, 35 + 50 + 98, 35 +
50 + 101, 35 + 50 + 102, 35 + 50 + 104, 35 + 50 + 106, 35 + 50 + 107, 35 + 50 + 108,
35 + 53 + 55, 35 + 53 + 57, 35 + 53 + 59, 35 + 53 + 98, 35 + 53 + 101, 35 + 53 + 102,
35 + 53 + 104, 35 + 53 + 106, 35 + 53 + 107, 35 + 53 + 108, 35 + 55 + 57, 35 + 55 +
59, 35 + 55 + 98, 35 + 55 + 101, 35 + 55 + 102, 35 + 55 + 104, 35 + 55 + 106, 35 + 55 +
107, 35 + 55 + 108, 35 + 57 + 59, 35 + 57 + 98, 35 + 57 + 101, 35 + 57 + 102, 35 +
57 + 104, 35 + 57 + 106, 35 + 57 + 107, 35 + 57 + 108, 35 + 59 + 98, 35 + 59 + 101,
35 + 59 + 102, 35 + 59 + 104, 35 + 59 + 106, 35 + 59 + 107, 35 + 59 + 108, 35 + 98 +
101, 35 + 98 + 102, 35 + 98 + 104, 35 + 98 + 106, 35 + 98 + 107, 35 + 98 + 108, 35 +
101 + 102, 35 + 101 + 104, 35 + 101 + 106, 35 + 101 + 107, 35 + 101 + 108, 35 + 102 +
104, 35 + 102 + 106, 35 + 102 + 107, 35 + 102 + 108, 35 + 104 + 106, 35 + 104 +
107, 35 + 104 + 108, 35 + 106 + 107, 35 + 106 + 108, 35 + 107 + 108, 50 + 53 + 55, 50 +
53 + 57, 50 + 53 + 59, 50 + 53 + 98, 50 + 53 + 101, 50 + 53 + 102, 50 + 53 + 104, 50 +
53 + 106, 50 + 53 + 107, 50 + 53 + 108, 50 + 55 + 57, 50 + 55 + 59, 50 + 55 + 98, 50 +
55 + 101, 50 + 55 + 102, 50 + 55 + 104, 50 + 55 + 106, 50 + 55 + 107, 50 + 55 + 108,
50 + 57 + 59, 50 + 57 + 98, 50 + 57 + 101, 50 + 57 + 102, 50 + 57 + 104, 50 + 57 +
106, 50 + 57 + 107, 50 + 57 + 108, 50 + 59 + 98, 50 + 59 + 101, 50 + 59 + 102, 50 +
59 + 104, 50 + 59 + 106, 50 + 59 + 107, 50 + 59 + 108, 50 + 98 + 101, 50 + 98 + 102,
50 + 98 + 104, 50 + 98 + 106, 50 + 98 + 107, 50 + 98 + 108, 50 + 101 + 102, 50 + 101 +
104, 50 + 101 + 106, 50 + 101 + 107, 50 + 101 + 108, 50 + 102 + 104, 50 + 102 +
106, 50 + 102 + 107, 50 + 102 + 108, 50 + 104 + 106, 50 + 104 + 107, 50 + 104 + 108,
50 + 106 + 107, 50 + 106 + 108, 50 + 107 + 108, 53 + 55 + 57, 53 + 55 + 59, 53 + 55 +
98, 53 + 55 + 101, 53 + 55 + 102, 53 + 55 + 104, 53 + 55 + 106, 53 + 55 + 107, 53 +
55 + 108, 53 + 57 + 59, 53 + 57 + 98, 53 + 57 + 101, 53 + 57 + 102, 53 + 57 + 104, 53 +
57 + 106, 53 + 57 + 107, 53 + 57 + 108, 53 + 59 + 98, 53 + 59 + 101, 53 + 59 + 102,
53 + 59 + 104, 53 + 59 + 106, 53 + 59 + 107, 53 + 59 + 108, 53 + 98 + 101, 53 + 98 +
102, 53 + 98 + 104, 53 + 98 + 106, 53 + 98 + 107, 53 + 98 + 108, 53 + 101 + 102, 53 +
101 + 104, 53 + 101 + 106, 53 + 101 + 107, 53 + 101 + 108, 53 + 102 + 104, 53 + 102 +
106, 53 + 102 + 107, 53 + 102 + 108, 53 + 104 + 106, 53 + 104 + 107, 53 + 104 +
108, 53 + 106 + 107, 53 + 106 + 108, 53 + 107 + 108, 55 + 57 + 59, 55 + 57 + 98, 55 +
57 + 101, 55 + 57 + 102, 55 + 57 + 104, 55 + 57 + 106, 55 + 57 + 107, 55 + 57 + 108,
55 + 59 + 98, 55 + 59 + 101, 55 + 59 + 102, 55 + 59 + 104, 55 + 59 + 106, 55 + 59 +
107, 55 + 59 + 108, 55 + 98 + 101, 55 + 98 + 102, 55 + 98 + 104, 55 + 98 + 106, 55 +
98 + 107, 55 + 98 + 108, 55 + 101 + 102, 55 + 101 + 104, 55 + 101 + 106, 55 + 101 +
107, 55 + 101 + 108, 55 + 102 + 104, 55 + 102 + 106, 55 + 102 + 107, 55 + 102 + 108,
55 + 104 + 106, 55 + 104 + 107, 55 + 104 + 108, 55 + 106 + 107, 55 + 106 + 108, 55 +
107 + 108, 57 + 59 + 98, 57 + 59 + 101, 57 + 59 + 102, 57 + 59 + 104, 57 + 59 + 106,
57 + 59 + 107, 57 + 59 + 108, 57 + 98 + 101, 57 + 98 + 102, 57 + 98 + 104, 57 + 98 +
106, 57 + 98 + 107, 57 + 98 + 108, 57 + 101 + 102, 57 + 101 + 104, 57 + 101 + 106, 57 +
101 + 107, 57 + 101 + 108, 57 + 102 + 104, 57 + 102 + 106, 57 + 102 + 107, 57 +
102 + 108, 57 + 104 + 106, 57 + 104 + 107, 57 + 104 + 108, 57 + 106 + 107, 57 + 106 +
108, 57 + 107 + 108, 59 + 98 + 101, 59 + 98 + 102, 59 + 98 + 104, 59 + 98 + 106, 59 +
98 + 107, 59 + 98 + 108, 59 + 101 + 102, 59 + 101 + 104, 59 + 101 + 106, 59 + 101 +
107, 59 + 101 + 108, 59 + 102 + 104, 59 + 102 + 106, 59 + 102 + 107, 59 + 102 + 108,
59 + 104 + 106, 59 + 104 + 107, 59 + 104 + 108, 59 + 106 + 107, 59 + 106 + 108, 59 +
107 + 108, 98 + 101 + 102, 98 + 101 + 104, 98 + 101 + 106, 98 + 101 + 107, 98 + 101 +
108, 98 + 102 + 104, 98 + 102 + 106, 98 + 102 + 107, 98 + 102 + 108, 98 + 104 +
106, 98 + 104 + 107, 98 + 104 + 108, 98 + 106 + 107, 98 + 106 + 108, 98 + 107 + 108,
101 + 102 + 104, 101 + 102 + 106, 101 + 102 + 107, 101 + 102 + 108, 101 + 104 + 106,
101 + 104 + 107, 101 + 104 + 108, 101 + 106 + 107, 101 + 106 + 108, 101 + 107 + 108,
102 + 104 + 106, 102 + 104 + 107, 102 + 104 + 108, 102 + 106 + 107, 102 + 106 + 108,
102+ 107 + 108, 104 + 106 + 107, 104 + 106 + 108, 104 + 107 + 108, 106 + 107 + 108

[0280] In some examples of any of the ABPCs described herein, a light chain variable domain includes a light chain variable domain that is at least 90% (e.g., at least 92%, at least 94%, at least 96%, at least 98%, at least 99%, or 100%) identical to SEQ ID NO: 144, where the light chain variable domain includes a histidine at any of the specific combinations of one or more amino acid positions in SEQ ID NO: 144 listed in Table 4.

TABLE 4
Exemplary Combinations of Amino Acid Positions in SEQ
ID NO: 144 that can be Substituted with Histidine

25 + 29, 25 + 30, 25 + 36, 25 + 37, 25 + 38, 25 + 39, 25 + 55, 25 + 94, 25 + 95, 25 +
97, 25 + 99, 25 + 100, 25 + 101, 25 + 102, 29 + 30, 29 + 36, 29 + 37, 29 + 38, 29 +
39, 29 + 55, 29 + 94, 29 + 95, 29 + 97, 29 + 99, 29 + 100, 29 + 101, 29 + 102, 30 +
36, 30 + 37, 30 + 38, 30 + 39, 30 + 55, 30 + 94, 30 + 95, 30 + 97, 30 + 99, 30 + 100,
30 + 101, 30 + 102, 36 + 37, 36 + 38, 36 + 39, 36 + 55, 36 + 94, 36 + 95, 36 + 97, 36 +
99, 36 + 100, 36 + 101, 36 + 102, 37 + 38, 37 + 39, 37 + 55, 37 + 94, 37 + 95, 37 +
97, 37 + 99, 37 + 100, 37 + 101, 37 + 102, 38 + 39, 38 + 55, 38 + 94, 38 + 95, 38 +
97, 38 + 99, 38 + 100, 38 + 101, 38 + 102, 39 + 55, 39 + 94, 39 + 95, 39 + 97, 39 +
99, 39 + 100, 39 + 101, 39 + 102, 55 + 94, 55 + 95, 55 + 97, 55 + 99, 55 + 100, 55 +
101, 55 + 102, 94 + 95, 94 + 97, 94 + 99, 94 + 100, 94 + 101, 94 + 102, 95 + 97, 95 +
99, 95 + 100, 95 + 101, 95 + 102, 97 + 99, 97 + 100, 97 + 101, 97 + 102, 99 + 100,
99 + 101, 99 + 102, 100 + 101, 100 + 102, 101 + 102, 25 + 29 + 30, 25 + 29 + 36, 25 +
29 + 37, 25 + 29 + 38, 25 + 29 + 39, 25 + 29 + 55, 25 + 29 + 94, 25 + 29 + 95, 25 + 29 +
97, 25 + 29 + 99, 25 + 29 + 100, 25 + 29 + 101, 25 + 29 + 102, 25 + 30 + 36, 25 + 30 +
37, 25 + 30 + 38, 25 + 30 + 39, 25 + 30 + 55, 25 + 30 + 94, 25 + 30 + 95, 25 + 30 +
97, 25 + 30 + 99, 25 + 30 + 100, 25 + 30 + 101, 25 + 30 + 102, 25 + 36 + 37, 25 + 36 +
38, 25 + 36 + 39, 25 + 36 + 55, 25 + 36 + 94, 25 + 36 + 95, 25 + 36 + 97, 25 + 36 + 99,
25 + 36 + 100, 25 + 36 + 101, 25 + 36 + 102, 25 + 37 + 38, 25 + 37 + 39, 25 + 37 + 55,
25 + 37 + 94, 25 + 37 + 95, 25 + 37 + 97, 25 + 37 + 99, 25 + 37 + 100, 25 + 37 + 101,
25 + 37 + 102, 25 + 38 + 39, 25 + 38 + 55, 25 + 38 + 94, 25 + 38 + 95, 25 + 38 + 97,
25 + 38 + 99, 25 + 38 + 100, 25 + 38 + 101, 25 + 38 + 102, 25 + 39 + 55, 25 + 39 + 94,
25 + 39 + 95, 25 + 39 + 97, 25 + 39 + 99, 25 + 39 + 100, 25 + 39 + 101, 25 + 39 + 102,
25 + 55 + 94, 25 + 55 + 95, 25 + 55 + 97, 25 + 55 + 99, 25 + 55 + 100, 25 + 55 + 101,
25 + 55 + 102, 25 + 94 + 95, 25 + 94 + 97, 25 + 94 + 99, 25 + 94 + 100, 25 + 94 + 101,
25 + 94 + 102, 25 + 95 + 97, 25 + 95 + 99, 25 + 95 + 100, 25 + 95 + 101, 25 + 95 +
102, 25 + 97 + 99, 25 + 97 + 100, 25 + 97 + 101, 25 + 97 + 102, 25 + 99 + 100, 25 +
99 + 101, 25 + 99 + 102, 25 + 100 + 101, 25 + 100 + 102, 25 + 101 + 102, 29 + 30 +
36, 29 + 30 + 37, 29 + 30 + 38, 29 + 30 + 39, 29 + 30 + 55, 29 + 30 + 94, 29 + 30 + 95,
29 + 30 + 97, 29 + 30 + 99, 29 + 30 + 100, 29 + 30 + 101, 29 + 30 + 102, 29 + 36 + 37,
29 + 36 + 38, 29 + 36 + 39, 29 + 36 + 55, 29 + 36 + 94, 29 + 36 + 95, 29 + 36 + 97, 29 +
36 + 99, 29 + 36 + 100, 29 + 36 + 101, 29 + 36 + 102, 29 + 37 + 38, 29 + 37 + 39, 29 +
37 + 55, 29 + 37 + 94, 29 + 37 + 95, 29 + 37 + 97, 29 + 37 + 99, 29 + 37 + 100, 29 +
37 + 101, 29 + 37 + 102, 29 + 38 + 39, 29 + 38 + 55, 29 + 38 + 94, 29 + 38 + 95, 29 +
38 + 97, 29 + 38 + 99, 29 + 38 + 100, 29 + 38 + 101, 29 + 38 + 102, 29 + 39 + 55, 29 +
39 + 94, 29 + 39 + 95, 29 + 39 + 97, 29 + 39 + 99, 29 + 39 + 100, 29 + 39 + 101, 29 +
39 + 102, 29 + 55 + 94, 29 + 55 + 95, 29 + 55 + 97, 29 + 55 + 99, 29 + 55 + 100, 29 +
55 + 101, 29 + 55 + 102, 29 + 94 + 95, 29 + 94 + 97, 29 + 94 + 99, 29 + 94 + 100, 29 +
94 + 101, 29 + 94 + 102, 29 + 95 + 97, 29 + 95 + 99, 29 + 95 + 100, 29 + 95 + 101, 29 +
95 + 102, 29 + 97 + 99, 29 + 97 + 100, 29 + 97 + 101, 29 + 97 + 102, 29 + 99 + 100,
29 + 99 + 101, 29 + 99 + 102, 29 + 100 + 101, 29 + 100 + 102, 29 + 101 + 102, 30 + 36 +
37, 30 + 36 + 38, 30 + 36 + 39, 30 + 36 + 55, 30 + 36 + 94, 30 + 36 + 95, 30 + 36 +
97, 30 + 36 + 99, 30 + 36 + 100, 30 + 36 + 101, 30 + 36 + 102, 30 + 37 + 38, 30 + 37 +
39, 30 + 37 + 55, 30 + 37 + 94, 30 + 37 + 95, 30 + 37 + 97, 30 + 37 + 99, 30 + 37 +
100, 30 + 37 + 101, 30 + 37 + 102, 30 + 38 + 39, 30 + 38 + 55, 30 + 38 + 94, 30 + 38 +
95, 30 + 38 + 97, 30 + 38 + 99, 30 + 38 + 100, 30 + 38 + 101, 30 + 38 + 102, 30 + 39 +
55, 30 + 39 + 94, 30 + 39 + 95, 30 + 39 + 97, 30 + 39 + 99, 30 + 39 + 100, 30 + 39 +
101, 30 + 39 + 102, 30 + 55 + 94, 30 + 55 + 95, 30 + 55 + 97, 30 + 55 + 99, 30 + 55 +
100, 30 + 55 + 101, 30 + 55 + 102, 30 + 94 + 95, 30 + 94 + 97, 30 + 94 + 99, 30 + 94 +
100, 30 + 94 + 101, 30 + 94 + 102, 30 + 95 + 97, 30 + 95 + 99, 30 + 95 + 100, 30 + 95 +
101, 30 + 95 + 102, 30 + 97 + 99, 30 + 97 + 100, 30 + 97 + 101, 30 + 97 + 102, 30 +
99 + 100, 30 + 99 + 101, 30 + 99 + 102, 30 + 100 + 101, 30 + 100 + 102, 30 + 101 +
102, 36 + 37 + 38, 36 + 37 + 39, 36 + 37 + 55, 36 + 37 + 94, 36 + 37 + 95, 36 + 37 +
97, 36 + 37 + 99, 36 + 37 + 100, 36 + 37 + 101, 36 + 37 + 102, 36 + 38 + 39, 36 + 38 +
55, 36 + 38 + 94, 36 + 38 + 95, 36 + 38 + 97, 36 + 38 + 99, 36 + 38 + 100, 36 + 38 +
101, 36 + 38 + 102, 36 + 39 + 55, 36 + 39 + 94, 36 + 39 + 95, 36 + 39 + 97, 36 + 39 +
99, 36 + 39 + 100, 36 + 39 + 101, 36 + 39 + 102, 36 + 55 + 94, 36 + 55 + 95, 36 + 55 +
97, 36 + 55 + 99, 36 + 55 + 100, 36 + 55 + 101, 36 + 55 + 102, 36 + 94 + 95, 36 + 94 +
97, 36 + 94 + 99, 36 + 94 + 100, 36 + 94 + 101, 36 + 94 + 102, 36 + 95 + 97, 36 + 95 +
99, 36 + 95 + 100, 36 + 95 + 101, 36 + 95 + 102, 36 + 97 + 99, 36 + 97 + 100, 36 + 97 +
101, 36 + 97 + 102, 36 + 99 + 100, 36 + 99 + 101, 36 + 99 + 102, 36 + 100 + 101, 36 +
100 + 102, 36 + 101 + 102, 37 + 38 + 39, 37 + 38 + 55, 37 + 38 + 94, 37 + 38 + 95,
37 + 38 + 97, 37 + 38 + 99, 37 + 38 + 100, 37 + 38 + 101, 37 + 38 + 102, 37 + 39 + 55,
37 + 39 + 94, 37 + 39 + 95, 37 + 39 + 97, 37 + 39 + 99, 37 + 39 + 100, 37 + 39 + 101,
37 + 39 + 102, 37 + 55 + 94, 37 + 55 + 95, 37 + 55 + 97, 37 + 55 + 99, 37 + 55 + 100,
37 + 55 + 101, 37 + 55 + 102, 37 + 94 + 95, 37 + 94 + 97, 37 + 94 + 99, 37 + 94 + 100,
37 + 94 + 101, 37 + 94 + 102, 37 + 95 + 97, 37 + 95 + 99, 37 + 95 + 100, 37 + 95 +
101, 37 + 95 + 102, 37 + 97 + 99, 37 + 97 + 100, 37 + 97 + 101, 37 + 97 + 102, 37 +
99 + 100, 37 + 99 + 101, 37 + 99 + 102, 37 + 100 + 101, 37 + 100 + 102, 37 + 101 +
102, 38 + 39 + 55, 38 + 39 + 94, 38 + 39 + 95, 38 + 39 + 97, 38 + 39 + 99, 38 + 39 +
100, 38 + 39 + 101, 38 + 39 + 102, 38 + 55 + 94, 38 + 55 + 95, 38 + 55 + 97, 38 + 55 +
99, 38 + 55 + 100, 38 + 55 + 101, 38 + 55 + 102, 38 + 94 + 95, 38 + 94 + 97, 38 + 94 +
99, 38 + 94 + 100, 38 + 94 + 101, 38 + 94 + 102, 38 + 95 + 97, 38 + 95 + 99, 38 + 95 +
100, 38 + 95 + 101, 38 + 95 + 102, 38 + 97 + 99, 38 + 97 + 100, 38 + 97 + 101, 38 +
97 + 102, 38 + 99 + 100, 38 + 99 + 101, 38 + 99 + 102, 38 + 100 + 101, 38 + 100 +
102, 38 + 101 + 102, 39 + 55 + 94, 39 + 55 + 95, 39 + 55 + 97, 39 + 55 + 99, 39 + 55 +
100, 39 + 55 + 101, 39 + 55 + 102, 39 + 94 + 95, 39 + 94 + 97, 39 + 94 + 99, 39 + 94 +
100, 39 + 94 + 101, 39 + 94 + 102, 39 + 95 + 97, 39 + 95 + 99, 39 + 95 + 100, 39 + 95 +
101, 39 + 95 + 102, 39 + 97 + 99, 39 + 97 + 100, 39 + 97 + 101, 39 + 97 + 102, 39 +
99 + 100, 39 + 99 + 101, 39 + 99 + 102, 39 + 100 + 101, 39 + 100 + 102, 39 + 101 +
102, 55 + 94 + 95, 55 + 94 + 97, 55 + 94 + 99, 55 + 94 + 100, 55 + 94 + 101, 55 + 94 +
102, 55 + 95 + 97, 55 + 95 + 99, 55 + 95 + 100, 55 + 95 + 101, 55 + 95 + 102, 55 + 97 +
99, 55 + 97 + 100, 55 + 97 + 101, 55 + 97 + 102, 55 + 99 + 100, 55 + 99 + 101, 55 +
99 + 102, 55 + 100 + 101, 55 + 100 + 102, 55 + 101 + 102, 94 + 95 + 97, 94 + 95 + 99,
94 + 95 + 100, 94 + 95 + 101, 94 + 95 + 102, 94 + 97 + 99, 94 + 97 + 100, 94 + 97 +
101, 94 + 97 + 102, 94 + 99 + 100, 94 + 99 + 101, 94 + 99 + 102, 94 + 100 + 101, 94 +
100 + 102, 94 + 101 + 102, 95 + 97 + 99, 95 + 97 + 100, 95 + 97 + 101, 95 + 97 + 102,
95 + 99 + 100, 95 + 99 + 101, 95 + 99 + 102, 95 + 100 + 101, 95 + 100 + 102, 95 + 101 +
102, 97 + 99 + 100, 97 + 99 + 101, 97 + 99 + 102, 97 + 100 + 101, 97 + 100 + 102,
97 + 101 + 102, 99 + 100 + 101, 99 + 100 + 102, 99 + 101 + 102, 100 + 101 + 102

[0281] In some examples of any of the ABPCs described herein, the first antigen-binding domain includes a heavy chain variable domain that is at least 90% (e.g., at least 92%, at least 94%, at least 96%, at least 98%, at least 99%, or 100%) identical to SEQ ID NO: 143, where the heavy chain variable domain includes a histidine at any of the specific combinations of one or more amino acid positions in SEQ ID NO: 143 listed in Table 3; and a light chain variable domain that that is at least 90% (e.g., at least 92%, at least 94%, at least 96%, at least 98%, at least 99%, or 100%) identical to SEQ ID NO: 144, where the light chain variable domain includes a histidine at any of the specific combinations of one or more amino acid positions in SEQ ID NO: 144 listed in Table 4.

[0282] In some examples of any of the ABPCs described herein, the first antigen-binding domain comprises a light chain variable domain comprising SEQ ID NO: 144, and a heavy chain variable domain that is at least 90% identical (e.g., at least 92%, at least 94%, at least 96%, at least 98%, at least 99%, or 100%) identical to SEQ ID NO: 143, where the heavy chain variable domain includes a histidine at any of the specific combinations of one or more (e.g., two, three, four, five, six, seven, eight, nine, or ten) amino acid positions in SEQ ID NO: 143 listed in Table 3.

[0283] In some examples of any of the ABPCs described herein, the first antigen-binding domain comprises a light chain variable domain that is at least 90% identical to SEQ ID NO: 144, wherein the light chain variable domain includes a histidine at position 25 in SEQ ID NO: 144; and a heavy chain variable domain that is at least 90% (e.g., at least 92%, at least 94%, at least 96%, at least 98%, at least 99%, or 100%) identical to SEQ ID NO: 143, where the heavy chain variable domain includes a histidine at any of the specific combinations of one or more amino acid positions in SEQ ID NO: 143 listed in Table 3.

[0284] In some examples of any of the ABPCs described herein, the first antigen-binding domain comprises a light chain variable domain that is at least 90% identical to SEQ ID NO: 144, wherein the light chain variable domain includes a histidine at position 29 in SEQ ID NO: 144; and a heavy chain variable domain that is at least 90% (e.g., at least 92%, at least 94%, at least 96%, at least 98%, at least 99%, or 100%) identical to SEQ ID NO: 143, where the heavy chain variable domain includes a histidine at any of the specific combinations of one or more amino acid positions in SEQ ID NO: 143 listed in Table 3.

[0285] In some examples of any of the ABPCs described herein, the first antigen-binding domain comprises a light chain variable domain that is at least 90% identical to SEQ ID NO: 144, wherein the light chain variable domain includes a histidine at position 30 in SEQ ID NO: 144; and a heavy chain variable domain that is at least 90% (e.g., at least 92%, at least 94%, at least 96%, at least 98%, at least 99%, or 100%) identical to SEQ ID NO: 143, where the heavy chain variable domain includes a histidine at any of the specific combinations of one or more amino acid positions in SEQ ID NO: 143 listed in Table 3.

[0286] In some examples of any of the ABPCs described herein, the first antigen-binding domain comprises a light chain variable domain that is at least 90% identical to SEQ ID NO: 144, wherein the light chain variable domain includes a histidine at position 36 in SEQ ID NO: 144; and a heavy chain variable domain that is at least 90% (e.g., at least 92%, at least 94%, at least 96%, at least 98%, at least 99%, or 100%) identical to SEQ ID NO: 143, where the heavy chain variable domain includes a histidine at any of the specific combinations of one or more amino acid positions in SEQ ID NO: 143 listed in Table 3.

[0287] In some examples of any of the ABPCs described herein, the first antigen-binding domain comprises a light chain variable domain that is at least 90% identical to SEQ ID NO: 144, wherein the light chain variable domain includes a histidine at position 37 in SEQ ID NO: 144; and a heavy chain variable domain that is at least 90% (e.g., at least 92%, at least 94%, at least 96%, at least 98%, at least 99%, or 100%) identical to SEQ ID NO: 143, where the heavy chain variable domain includes a histidine at any of the specific combinations of one or more amino acid positions in SEQ ID NO: 143 listed in Table 3.

[0288] In some examples of any of the ABPCs described herein, the first antigen-binding domain comprises a light chain variable domain that is at least 90% identical to SEQ ID NO: 144, wherein the light chain variable domain includes a histidine at position 38 in SEQ ID NO: 144; and a heavy chain variable domain that is at least 90% (e.g., at least 92%, at least 94%, at least 96%, at least 98%, at least 99%, or 100%) identical to SEQ ID NO: 143, where the heavy chain variable domain includes a histidine at any of the specific combinations of one or more amino acid positions in SEQ ID NO: 143 listed in Table 3.

[0289] In some examples of any of the ABPCs described herein, the first antigen-binding domain comprises a light chain variable domain that is at least 90% identical to SEQ ID NO: 144, wherein the light chain variable domain includes a histidine at position 39 in SEQ ID NO: 144; and a heavy chain variable domain that is at least 90% (e.g., at least 92%, at least 94%, at least 96%, at least 98%, at least 99%, or 100%) identical to SEQ ID NO: 143, where the heavy chain variable domain includes a histidine at any of the specific combinations of one or more amino acid positions in SEQ ID NO: 143 listed in Table 3.

[0290] In some examples of any of the ABPCs described herein, the first antigen-binding domain comprises a light chain variable domain that is at least 90% identical to SEQ ID NO: 144, wherein the light chain variable domain includes a histidine at position 55 in SEQ ID NO: 144; and a heavy chain variable domain that is at least 90% (e.g., at least 92%, at least 94%, at least 96%, at least 98%, at least 99%, or 100%) identical to SEQ ID NO: 143, where the heavy chain variable domain includes a histidine at any of the specific combinations of one or more amino acid positions in SEQ ID NO: 143 listed in Table 3.

[0291] In some examples of any of the ABPCs described herein, the first antigen-binding domain comprises a light chain variable domain that is at least 90% identical to SEQ ID NO: 144, wherein the light chain variable domain includes a histidine at position 94 in SEQ ID NO: 144; and a heavy chain variable domain that is at least 90% (e.g., at least 92%, at least 94%, at least 96%, at least 98%, at least 99%, or 100%) identical to SEQ ID NO: 143, where the heavy chain variable domain includes a histidine at any of the specific combinations of one or more amino acid positions in SEQ ID NO: 143 listed in Table 3.

[0292] In some examples of any of the ABPCs described herein, the first antigen-binding domain comprises a light chain variable domain that is at least 90% identical to SEQ ID NO: 144, wherein the light chain variable domain includes a histidine at position 95 in SEQ ID NO: 144; and a heavy chain variable domain that is at least 90% (e.g., at least 92%, at least 94%, at least 96%, at least 98%, at least 99%, or 100%) identical to SEQ ID NO: 143, where the heavy chain variable domain includes a histidine at any of the specific combinations of one or more amino acid positions in SEQ ID NO: 143 listed in Table 3.

[0293] In some examples of any of the ABPCs described herein, the first antigen-binding domain comprises a light chain variable domain that is at least 90% identical to SEQ ID NO: 144, wherein the light chain variable domain includes a histidine at position 97 in SEQ ID NO: 144; and a heavy chain variable domain that is at least 90% (e.g., at least 92%, at least 94%, at least 96%, at least 98%, at least 99%, or 100%) identical to SEQ ID NO: 143, where the heavy chain variable domain includes a histidine at any of the specific combinations of one or more amino acid positions in SEQ ID NO: 143 listed in Table 3.

[0294] In some examples of any of the ABPCs described herein, the first antigen-binding domain comprises a light chain variable domain that is at least 90% identical to SEQ ID NO: 144, wherein the light chain variable domain includes a histidine at position 99 in SEQ ID NO: 144; and a heavy chain variable domain that is at least 90% (e.g., at least 92%, at least 94%, at least 96%, at least 98%, at least 99%, or 100%) identical to SEQ ID NO: 143, where the heavy chain variable domain includes a histidine at any of the specific combinations of one or more amino acid positions in SEQ ID NO: 143 listed in Table 3.

[0295] In some examples of any of the ABPCs described herein, the first antigen-binding domain comprises a light chain variable domain that is at least 90% identical to SEQ ID NO: 144, wherein the light chain variable domain includes a histidine at position 100 in SEQ ID NO: 144; and a heavy chain variable domain that is at least 90% (e.g., at least 92%, at least 94%, at least 96%, at least 98%, at least 99%, or 100%) identical to SEQ ID NO: 143, where the heavy chain variable domain includes a histidine at any of the specific combinations of one or more amino acid positions in SEQ ID NO: 143 listed in Table 3.

[0296] In some examples of any of the ABPCs described herein, the first antigen-binding domain comprises a light chain variable domain that is at least 90% identical to SEQ ID NO: 144, wherein the light chain variable domain includes a histidine at position 101 in SEQ ID NO: 144; and a heavy chain variable domain that is at least 90% (e.g., at least 92%, at least 94%, at least 96%, at least 98%, at least 99%, or 100%) identical to SEQ ID NO: 143, where the heavy chain variable domain includes a histidine at any of the specific combinations of one or more amino acid positions in SEQ ID NO: 143 listed in Table 3.

[0297] In some examples of any of the ABPCs described herein, the first antigen-binding domain comprises a light chain variable domain that is at least 90% identical to SEQ ID NO: 144, wherein the light chain variable domain includes a histidine at position 102 in SEQ ID NO: 144; and a heavy chain variable domain that is at least 90% (e.g., at least 92%, at least 94%, at least 96%, at least 98%, at least 99%, or 100%) identical to SEQ ID NO: 143, where the heavy chain variable domain includes a histidine at any of the specific combinations of one or more amino acid positions in SEQ ID NO: 143 listed in Table 3.

[0298] In some examples of any of the ABPCs described herein, the first antigen-binding domain includes a heavy chain variable domain of pinatuzumab with one or more (e.g., one, two, three, four, five, six, seven, eight, nine, ten, eleven, twelve, thirteen, fourteen, fifteen, sixteen, seventeen, eighteen, nineteen, or twenty) histidine(s) substituted with an alanine. In some examples of any of the ABPCs described herein, the first antigen-binding domain includes a light chain variable domain of pinatuzumab with one or more (e.g., one, two, three, four, five, six, seven, eight, nine, ten, eleven, twelve, thirteen, fourteen, fifteen, sixteen, seventeen, eighteen, nineteen, or twenty) histidine(s) substituted with an alanine. In some examples of any of the ABPCs described herein, the first antigen-binding domain includes a heavy chain variable domain of pinatuzumab with one or more (e.g., one, two, three, four, five, six, seven, eight, nine, ten, eleven, twelve, thirteen, fourteen, fifteen, sixteen, seventeen, eighteen, nineteen, or twenty) histidines substituted with an alanine; and a light chain variable domain of pinatuzumab with one or more (e.g., one, two, three, four, five, six, seven, eight, nine, ten, eleven, twelve, thirteen, fourteen, fifteen, sixteen, seventeen, eighteen, nineteen, or twenty) histidine(s) substituted with an alanine. In some examples of any of the ABPCs described herein, the heavy chain variable domain of pinatuzumab comprises SEQ ID NO: 143. In some examples of any of the ABPCs described herein, the light chain variable domain of pinatuzumab comprises SEQ ID NO: 144.

[0299] In some examples of any of the ABPCs described herein, the first antigen-binding domain comprises a heavy chain variable domain comprising a CDR1, a CDR2, and a CDR3 of SEQ ID NO: 145, SEQ ID NO: 146, and SEQ ID NO: 147, respectively, with collectively a total of one or more (e.g., one, two, three, four, five, six, seven, eight, nine, or ten) histidine(s) in SEQ ID NOs: 145-147 substituted with an alanine. In some examples of any of the ABPCs described herein, the first antigen-binding domain comprises a light chain variable domain comprising a CDR1, a CDR2, and a CDR3 of SEQ ID NO: 148, SEQ ID NO: 149, and SEQ ID NO: 150, respectively, with collectively a total of one or more (e.g., one, two, three, four, five, six, seven, eight, nine, or ten) histidine(s) in SEQ ID NOs: 148-150 substituted with an alanine. In some examples of any of the ABPCs described herein, the first antigen-binding domain includes: a heavy chain variable domain comprising a CDR1, a CDR2, and a CDR3 of SEQ ID NO: 145, SEQ ID NO: 146, and SEQ ID NO: 147, respectively, with collectively a total of one or more (e.g., one, two, three, four, five, six, seven, eight, nine, or ten) histidine(s) in SEQ ID NOs: 145-147 substituted with an alanine; and a light chain variable domain comprising a CDR1, a CDR2, and a CDR3 of SEQ ID NO: 148, SEQ ID NO: 149, and SEQ ID NO: 150, respectively, with collectively a total of one or more (e.g., one, two, three, four, five, six, seven, eight, nine, or ten) histidine(s) in SEQ ID NOs: 148-150 substituted with an alanine.

[0300] In some examples of any of the ABPCs described herein, the first antigen-binding domain comprises a heavy chain variable domain of SEQ ID NO: 143, SEQ ID NO: 151, SEQ ID NO: 152, SEQ ID NO: 153, SEQ ID NO: 154, SEQ ID NO: 155, SEQ ID NO: 156, SEQ ID NO: 157, SEQ ID NO: 158, SEQ ID NO: 159, SEQ ID NO: 160, SEQ ID NO: 161, SEQ ID NO: 162, SEQ ID NO: 163, SEQ ID NO: 164, SEQ ID NO: 165, SEQ ID NO: 166, SEQ ID NO: 167, SEQ ID NO: 168, SEQ ID NO: 169, SEQ ID NO: 170, SEQ ID NO: 171, SEQ ID NO: 172, SEQ ID NO: 173, SEQ ID NO: 174, SEQ ID NO: 175, SEQ ID NO: 176, SEQ ID NO: 177, SEQ ID NO: 178, SEQ ID NO: 179, SEQ ID NO: 180, SEQ ID NO: 181, SEQ ID NO: 182, SEQ ID NO: 183, SEQ ID NO: 184, SEQ ID NO: 185, SEQ ID NO: 186, SEQ ID NO: 187, SEQ ID NO: 188, SEQ ID NO: 189, or SEQ ID NO: 190.

[0301] In some examples of any of the ABPCs described herein, the first antigen-binding domain includes a light chain variable domain of SEQ ID NO: 144 SEQ ID NO: 191, SEQ ID NO: 192, SEQ ID NO: 193, SEQ ID NO: 194, SEQ ID NO: 195, SEQ ID NO: 196, SEQ ID NO: 197, SEQ ID NO: 198, SEQ ID NO: 199, SEQ ID NO: 200, SEQ ID NO: 201, SEQ ID NO: 202, SEQ ID NO: 203, SEQ ID NO: 204, SEQ ID NO: 205, SEQ ID NO: 206, SEQ ID NO: 207, SEQ ID NO: 208, SEQ ID NO: 209, SEQ ID NO: 210, SEQ ID NO: 211, SEQ ID NO: 212, SEQ ID NO: 213, SEQ ID NO: 214, SEQ ID NO: 215, SEQ ID NO: 216, SEQ ID NO: 217, SEQ ID NO: 218, SEQ ID NO: 219, SEQ ID NO: 220, SEQ ID NO: 221, SEQ ID NO: 222.

[0302] In some examples of any of the ABPCs described herein, the first antigen-binding domain includes a light chain variable domain comprising SEQ ID NO: 144, and a heavy chain variable domain comprising: SEQ ID NO: 151, SEQ ID NO: 152, SEQ ID NO: 153, SEQ ID NO: 154, SEQ ID NO: 155, SEQ ID NO: 156, SEQ ID NO: 157, SEQ ID NO: 158, SEQ ID NO: 159, SEQ ID NO: 160, SEQ ID NO: 161, SEQ ID NO: 162, SEQ ID NO: 163, SEQ ID NO: 164, SEQ ID NO: 165, SEQ ID NO: 166, SEQ ID NO: 167, SEQ ID NO: 168, SEQ ID NO: 169, SEQ ID NO: 170, SEQ ID NO: 171, SEQ ID NO: 172, SEQ ID NO: 173, SEQ ID NO: 174, SEQ ID NO: 175, SEQ ID NO: 176, SEQ ID NO: 177, SEQ ID NO: 178, SEQ ID NO: 179, SEQ ID NO: 180, SEQ ID NO: 181, SEQ ID NO: 182, SEQ ID NO: 183, SEQ ID NO: 184, SEQ ID NO: 185, SEQ ID NO: 186, SEQ ID NO: 187, SEQ ID NO: 188, SEQ ID NO: 189, or SEQ ID NO: 190.

[0303] In some examples of any of the ABPCs described herein, the first antigen-binding domain includes a light chain variable domain comprising SEQ ID NO: 191, and a heavy chain variable domain comprising: SEQ ID NO: 143, SEQ ID NO: 151, SEQ ID NO: 152, SEQ ID NO: 153, SEQ ID NO: 154, SEQ ID NO: 155, SEQ ID NO: 156, SEQ ID NO: 157, SEQ ID NO: 158, SEQ ID NO: 159, SEQ ID NO: 160, SEQ ID NO: 161, SEQ ID NO: 162, SEQ ID NO: 163, SEQ ID NO: 164, SEQ ID NO: 165, SEQ ID NO: 166, SEQ ID NO: 167, SEQ ID NO: 168, SEQ ID NO: 169, SEQ ID NO: 170, SEQ ID NO: 171, SEQ ID NO: 172, SEQ ID NO: 173, SEQ ID NO: 174, SEQ ID NO: 175, SEQ ID NO: 176, SEQ ID NO: 177, SEQ ID NO: 178, SEQ ID NO: 179, SEQ ID NO: 180, SEQ ID NO: 181, SEQ ID NO: 182, SEQ ID NO: 183, SEQ ID NO: 184, SEQ ID NO: 185, SEQ ID NO: 186, SEQ ID NO: 187, SEQ ID NO: 188, SEQ ID NO: 189, or SEQ ID NO: 190.

[0304] In some examples of any of the ABPCs described herein, the first antigen-binding domain includes a light chain variable domain comprising SEQ ID NO: 192, and a heavy chain variable domain comprising: SEQ ID NO: 143, SEQ ID NO: 151, SEQ ID NO: 152, SEQ ID NO: 153, SEQ ID NO: 154, SEQ ID NO: 155, SEQ ID NO: 156, SEQ ID NO: 157, SEQ ID NO: 158, SEQ ID NO: 159, SEQ ID NO: 160, SEQ ID NO: 161, SEQ ID NO: 162, SEQ ID NO: 163, SEQ ID NO: 164, SEQ ID NO: 165, SEQ ID NO: 166, SEQ ID NO: 167, SEQ ID NO: 168, SEQ ID NO: 169, SEQ ID NO: 170, SEQ ID NO: 171, SEQ ID NO: 172, SEQ ID NO: 173, SEQ ID NO: 174, SEQ ID NO: 175, SEQ ID NO: 176, SEQ ID NO: 177, SEQ ID NO: 178, SEQ ID NO: 179, SEQ ID NO: 180, SEQ ID NO: 181, SEQ ID NO: 182, SEQ ID NO: 183, SEQ ID NO: 184, SEQ ID NO: 185, SEQ ID NO: 186, SEQ ID NO: 187, SEQ ID NO: 188, SEQ ID NO: 189, or SEQ ID NO: 190.

[0305] In some examples of any of the ABPCs described herein, the first antigen-binding domain includes a light chain variable domain comprising SEQ ID NO: 193, and a heavy chain variable domain comprising: SEQ ID NO: 143, SEQ ID NO: 151, SEQ ID NO: 152, SEQ ID NO: 153, SEQ ID NO: 154, SEQ ID NO: 155, SEQ ID NO: 156, SEQ ID NO: 157, SEQ ID NO: 158, SEQ ID NO: 159, SEQ ID NO: 160, SEQ ID NO: 161, SEQ ID NO: 162, SEQ ID NO: 163, SEQ ID NO: 164, SEQ ID NO: 165, SEQ ID NO: 166, SEQ ID NO: 167, SEQ ID NO: 168, SEQ ID NO: 169, SEQ ID NO: 170, SEQ ID NO: 171, SEQ ID NO: 172, SEQ ID NO: 173, SEQ ID NO: 174, SEQ ID NO: 175, SEQ ID NO: 176, SEQ ID NO: 177, SEQ ID NO: 178, SEQ ID NO: 179, SEQ ID NO: 180, SEQ ID NO: 181, SEQ ID NO: 182, SEQ ID NO: 183, SEQ ID NO: 184, SEQ ID NO: 185, SEQ ID NO: 186, SEQ ID NO: 187, SEQ ID NO: 188, SEQ ID NO: 189, or SEQ ID NO: 190.

[0306] In some examples of any of the ABPCs described herein, the first antigen-binding domain includes a light chain variable domain comprising SEQ ID NO: 194, and a heavy chain variable domain comprising: SEQ ID NO: 143, SEQ ID NO: 151, SEQ ID NO: 152, SEQ ID NO: 153, SEQ ID NO: 154, SEQ ID NO: 155, SEQ ID NO: 156, SEQ ID NO: 157, SEQ ID NO: 158, SEQ ID NO: 159, SEQ ID NO: 160, SEQ ID NO: 161, SEQ ID NO: 162, SEQ ID NO: 163, SEQ ID NO: 164, SEQ ID NO: 165, SEQ ID NO: 166, SEQ ID NO: 167, SEQ ID NO: 168, SEQ ID NO: 169, SEQ ID NO: 170, SEQ ID NO: 171, SEQ ID NO: 172, SEQ ID NO: 173, SEQ ID NO: 174, SEQ ID NO: 175, SEQ ID NO: 176, SEQ ID NO: 177, SEQ ID NO: 178, SEQ ID NO: 179, SEQ ID NO: 180, SEQ ID NO: 181, SEQ ID NO: 182, SEQ ID NO: 183, SEQ ID NO: 184, SEQ ID NO: 185, SEQ ID NO: 186, SEQ ID NO: 187, SEQ ID NO: 188, SEQ ID NO: 189, or SEQ ID NO: 190.

[0307] In some examples of any of the ABPCs described herein, the first antigen-binding domain includes a light chain variable domain comprising SEQ ID NO: 195, and a heavy chain variable domain comprising: SEQ ID NO: 143, SEQ ID NO: 151, SEQ ID NO: 152, SEQ ID NO: 153, SEQ ID NO: 154, SEQ ID NO: 155, SEQ ID NO: 156, SEQ ID NO: 157, SEQ ID NO: 158, SEQ ID NO: 159, SEQ ID NO: 160, SEQ ID NO: 161, SEQ ID NO: 162, SEQ ID NO: 163, SEQ ID NO: 164, SEQ ID NO: 165, SEQ ID NO: 166, SEQ ID NO: 167, SEQ ID NO: 168, SEQ ID NO: 169, SEQ ID NO: 170, SEQ ID NO: 171, SEQ ID NO: 172, SEQ ID NO: 173, SEQ ID NO: 174, SEQ ID NO: 175, SEQ ID NO: 176, SEQ ID NO: 177, SEQ ID NO: 178, SEQ ID NO: 179, SEQ ID NO: 180, SEQ ID NO: 181, SEQ ID NO: 182, SEQ ID NO: 183, SEQ ID NO: 184, SEQ ID NO: 185, SEQ ID NO: 186, SEQ ID NO: 187, SEQ ID NO: 188, SEQ ID NO: 189, or SEQ ID NO: 190.

[0308] In some examples of any of the ABPCs described herein, the first antigen-binding domain includes a light chain variable domain comprising SEQ ID NO: 196, and a heavy chain variable domain comprising: SEQ ID NO: 143, SEQ ID NO: 151, SEQ ID NO: 152, SEQ ID NO: 153, SEQ ID NO: 154, SEQ ID NO: 155, SEQ ID NO: 156, SEQ ID NO: 157, SEQ ID NO: 158, SEQ ID NO: 159, SEQ ID NO: 160, SEQ ID NO: 161, SEQ ID NO: 162, SEQ ID NO: 163, SEQ ID NO: 164, SEQ ID NO: 165, SEQ ID NO: 166, SEQ ID NO: 167, SEQ ID NO: 168, SEQ ID NO: 169, SEQ ID NO: 170, SEQ ID NO: 171, SEQ ID NO: 172, SEQ ID NO: 173, SEQ ID NO: 174, SEQ ID NO: 175, SEQ ID NO: 176, SEQ ID NO: 177, SEQ ID NO: 178, SEQ ID NO: 179, SEQ ID NO: 180, SEQ ID NO: 181, SEQ ID NO: 182, SEQ ID NO: 183, SEQ ID NO: 184, SEQ ID NO: 185, SEQ ID NO: 186, SEQ ID NO: 187, SEQ ID NO: 188, SEQ ID NO: 189, or SEQ ID NO: 190.

[0309] In some examples of any of the ABPCs described herein, the first antigen-binding domain includes a light chain variable domain comprising SEQ ID NO: 197, and a heavy chain variable domain comprising: SEQ ID NO: 143, SEQ ID NO: 151, SEQ ID NO: 152, SEQ ID NO: 153, SEQ ID NO: 154, SEQ ID NO: 155, SEQ ID NO: 156, SEQ ID NO: 157, SEQ ID NO: 158, SEQ ID NO: 159, SEQ ID NO: 160, SEQ ID NO: 161, SEQ ID NO: 162, SEQ ID NO: 163, SEQ ID NO: 164, SEQ ID NO: 165, SEQ ID NO: 166, SEQ ID NO: 167, SEQ ID NO: 168, SEQ ID NO: 169, SEQ ID NO: 170, SEQ ID NO: 171, SEQ ID NO: 172, SEQ ID NO: 173, SEQ ID NO: 174, SEQ ID NO: 175, SEQ ID NO: 176, SEQ ID NO: 177, SEQ ID NO: 178, SEQ ID NO: 179, SEQ ID NO: 180, SEQ ID NO: 181, SEQ ID NO: 182, SEQ ID NO: 183, SEQ ID NO: 184, SEQ ID NO: 185, SEQ ID NO: 186, SEQ ID NO: 187, SEQ ID NO: 188, SEQ ID NO: 189, or SEQ ID NO: 190.

[0310] In some examples of any of the ABPCs described herein, the first antigen-binding domain includes a light chain variable domain comprising SEQ ID NO: 198, and a heavy chain variable domain comprising: SEQ ID NO: 143, SEQ ID NO: 151, SEQ ID NO: 152, SEQ ID NO: 153, SEQ ID NO: 154, SEQ ID NO: 155, SEQ ID NO: 156, SEQ ID NO: 157, SEQ ID NO: 158, SEQ ID NO: 159, SEQ ID NO: 160, SEQ ID NO: 161, SEQ ID NO: 162, SEQ ID NO: 163, SEQ ID NO: 164, SEQ ID NO: 165, SEQ ID NO: 166, SEQ ID NO: 167, SEQ ID NO: 168, SEQ ID NO: 169, SEQ ID NO: 170, SEQ ID NO: 171, SEQ ID NO: 172, SEQ ID NO: 173, SEQ ID NO: 174, SEQ ID NO: 175, SEQ ID NO: 176, SEQ ID NO: 177, SEQ ID NO: 178, SEQ ID NO: 179, SEQ ID NO: 180, SEQ ID NO: 181, SEQ ID NO: 182, SEQ ID NO: 183, SEQ ID NO: 184, SEQ ID NO: 185, SEQ ID NO: 186, SEQ ID NO: 187, SEQ ID NO: 188, SEQ ID NO: 189, or SEQ ID NO: 190.

[0311] In some examples of any of the ABPCs described herein, the first antigen-binding domain includes a light chain variable domain comprising SEQ ID NO: 199, and a heavy chain variable domain comprising: SEQ ID NO: 143, SEQ ID NO: 151, SEQ ID NO: 152, SEQ ID NO: 153, SEQ ID NO: 154, SEQ ID NO: 155, SEQ ID NO: 156, SEQ ID NO: 157, SEQ ID NO: 158, SEQ ID NO: 159, SEQ ID NO: 160, SEQ ID NO: 161, SEQ ID NO: 162, SEQ ID NO: 163, SEQ ID NO: 164, SEQ ID NO: 165, SEQ ID NO: 166, SEQ ID NO: 167, SEQ ID NO: 168, SEQ ID NO: 169, SEQ ID NO: 170, SEQ ID NO: 171, SEQ ID NO: 172, SEQ ID NO: 173, SEQ ID NO: 174, SEQ ID NO: 175, SEQ ID NO: 176, SEQ ID NO: 177, SEQ ID NO: 178, SEQ ID NO: 179, SEQ ID NO: 180, SEQ ID NO: 181, SEQ ID NO: 182, SEQ ID NO: 183, SEQ ID NO: 184, SEQ ID NO: 185, SEQ ID NO: 186, SEQ ID NO: 187, SEQ ID NO: 188, SEQ ID NO: 189, or SEQ ID NO: 190.

[0312] In some examples of any of the ABPCs described herein, the first antigen-binding domain includes a light chain variable domain comprising SEQ ID NO: 200, and a heavy chain variable domain comprising: SEQ ID NO: 143, SEQ ID NO: 151, SEQ ID NO: 152, SEQ ID NO: 153, SEQ ID NO: 154, SEQ ID NO: 155, SEQ ID NO: 156, SEQ ID NO: 157, SEQ ID NO: 158, SEQ ID NO: 159, SEQ ID NO: 160, SEQ ID NO: 161, SEQ ID NO: 162, SEQ ID NO: 163, SEQ ID NO: 164, SEQ ID NO: 165, SEQ ID NO: 166, SEQ ID NO: 167, SEQ ID NO: 168, SEQ ID NO: 169, SEQ ID NO: 170, SEQ ID NO: 171, SEQ ID NO: 172, SEQ ID NO: 173, SEQ ID NO: 174, SEQ ID NO: 175, SEQ ID NO: 176, SEQ ID NO: 177, SEQ ID NO: 178, SEQ ID NO: 179, SEQ ID NO: 180, SEQ ID NO: 181, SEQ ID NO: 182, SEQ ID NO: 183, SEQ ID NO: 184, SEQ ID NO: 185, SEQ ID NO: 186, SEQ ID NO: 187, SEQ ID NO: 188, SEQ ID NO: 189, or SEQ ID NO: 190.

[0313] In some examples of any of the ABPCs described herein, the first antigen-binding domain includes a light chain variable domain comprising SEQ ID NO: 201, and a heavy chain variable domain comprising: SEQ ID NO: 143, SEQ ID NO: 151, SEQ ID NO: 152, SEQ ID NO: 153, SEQ ID NO: 154, SEQ ID NO: 155, SEQ ID NO: 156, SEQ ID NO: 157, SEQ ID NO: 158, SEQ ID NO: 159, SEQ ID NO: 160, SEQ ID NO: 161, SEQ ID NO: 162, SEQ ID NO: 163, SEQ ID NO: 164, SEQ ID NO: 165, SEQ ID NO: 166, SEQ ID NO: 167, SEQ ID NO: 168, SEQ ID NO: 169, SEQ ID NO: 170, SEQ ID NO: 171, SEQ ID NO: 172, SEQ ID NO: 173, SEQ ID NO: 174, SEQ ID NO: 175, SEQ ID NO: 176, SEQ ID NO: 177, SEQ ID NO: 178, SEQ ID NO: 179, SEQ ID NO: 180, SEQ ID NO: 181, SEQ ID NO: 182, SEQ ID NO: 183, SEQ ID NO: 184, SEQ ID NO: 185, SEQ ID NO: 186, SEQ ID NO: 187, SEQ ID NO: 188, SEQ ID NO: 189, or SEQ ID NO: 190.

[0314] In some examples of any of the ABPCs described herein, the first antigen-binding domain includes a light chain variable domain comprising SEQ ID NO: 202, and a heavy chain variable domain comprising: SEQ ID NO: 143, SEQ ID NO: 151, SEQ ID NO: 152, SEQ ID NO: 153, SEQ ID NO: 154, SEQ ID NO: 155, SEQ ID NO: 156, SEQ ID NO: 157, SEQ ID NO: 158, SEQ ID NO: 159, SEQ ID NO: 160, SEQ ID NO: 161, SEQ ID NO: 162, SEQ ID NO: 163, SEQ ID NO: 164, SEQ ID NO: 165, SEQ ID NO: 166, SEQ ID NO: 167, SEQ ID NO: 168, SEQ ID NO: 169, SEQ ID NO: 170, SEQ ID NO: 171, SEQ ID NO: 172, SEQ ID NO: 173, SEQ ID NO: 174, SEQ ID NO: 175, SEQ ID NO: 176, SEQ ID NO: 177, SEQ ID NO: 178, SEQ ID NO: 179, SEQ ID NO: 180, SEQ ID NO: 181, SEQ ID NO: 182, SEQ ID NO: 183, SEQ ID NO: 184, SEQ ID NO: 185, SEQ ID NO: 186, SEQ ID NO: 187, SEQ ID NO: 188, SEQ ID NO: 189, or SEQ ID NO: 190.

[0315] In some examples of any of the ABPCs described herein, the first antigen-binding domain includes a light chain variable domain comprising SEQ ID NO: 203, and a heavy chain variable domain comprising: SEQ ID NO: 143, SEQ ID NO: 151, SEQ ID NO: 152, SEQ ID NO: 153, SEQ ID NO: 154, SEQ ID NO: 155, SEQ ID NO: 156, SEQ ID NO: 157, SEQ ID NO: 158, SEQ ID NO: 159, SEQ ID NO: 160, SEQ ID NO: 161, SEQ ID NO: 162, SEQ ID NO: 163, SEQ ID NO: 164, SEQ ID NO: 165, SEQ ID NO: 166, SEQ ID NO: 167, SEQ ID NO: 168, SEQ ID NO: 169, SEQ ID NO: 170, SEQ ID NO: 171, SEQ ID NO: 172, SEQ ID NO: 173, SEQ ID NO: 174, SEQ ID NO: 175, SEQ ID NO: 176, SEQ ID NO: 177, SEQ ID NO: 178, SEQ ID NO: 179, SEQ ID NO: 180, SEQ ID NO: 181, SEQ ID NO: 182, SEQ ID NO: 183, SEQ ID NO: 184, SEQ ID NO: 185, SEQ ID NO: 186, SEQ ID NO: 187, SEQ ID NO: 188, SEQ ID NO: 189, or SEQ ID NO: 190.

[0316] In some examples of any of the ABPCs described herein, the first antigen-binding domain includes a light chain variable domain comprising SEQ ID NO: 204, and a heavy chain variable domain comprising: SEQ ID NO: 143, SEQ ID NO: 151, SEQ ID NO: 152, SEQ ID NO: 153, SEQ ID NO: 154, SEQ ID NO: 155, SEQ ID NO: 156, SEQ ID NO: 157, SEQ ID NO: 158, SEQ ID NO: 159, SEQ ID NO: 160, SEQ ID NO: 161, SEQ ID NO: 162, SEQ ID NO: 163, SEQ ID NO: 164, SEQ ID NO: 165, SEQ ID NO: 166, SEQ ID NO: 167, SEQ ID NO: 168, SEQ ID NO: 169, SEQ ID NO: 170, SEQ ID NO: 171, SEQ ID NO: 172, SEQ ID NO: 173, SEQ ID NO: 174, SEQ ID NO: 175, SEQ ID NO: 176, SEQ ID NO: 177, SEQ ID NO: 178, SEQ ID NO: 179, SEQ ID NO: 180, SEQ ID NO: 181, SEQ ID NO: 182, SEQ ID NO: 183, SEQ ID NO: 184, SEQ ID NO: 185, SEQ ID NO: 186, SEQ ID NO: 187, SEQ ID NO: 188, SEQ ID NO: 189, or SEQ ID NO: 190.

[0317] In some examples of any of the ABPCs described herein, the first antigen-binding domain includes a light chain variable domain comprising SEQ ID NO: 205, and a heavy chain variable domain comprising: SEQ ID NO: 143, SEQ ID NO: 151, SEQ ID NO: 152, SEQ ID NO: 153, SEQ ID NO: 154, SEQ ID NO: 155, SEQ ID NO: 156, SEQ ID NO: 157, SEQ ID NO: 158, SEQ ID NO: 159, SEQ ID NO: 160, SEQ ID NO: 161, SEQ ID NO: 162, SEQ ID NO: 163, SEQ ID NO: 164, SEQ ID NO: 165, SEQ ID NO: 166, SEQ ID NO: 167, SEQ ID NO: 168, SEQ ID NO: 169, SEQ ID NO: 170, SEQ ID NO: 171, SEQ ID NO: 172, SEQ ID NO: 173, SEQ ID NO: 174, SEQ ID NO: 175, SEQ ID NO: 176, SEQ ID NO: 177, SEQ ID NO: 178, SEQ ID NO: 179, SEQ ID NO: 180, SEQ ID NO: 181, SEQ ID NO: 182, SEQ ID NO: 183, SEQ ID NO: 184, SEQ ID NO: 185, SEQ ID NO: 186, SEQ ID NO: 187, SEQ ID NO: 188, SEQ ID NO: 189, or SEQ ID NO: 190.

[0318] In some examples of any of the ABPCs described herein, the first antigen-binding domain includes a light chain variable domain comprising SEQ ID NO: 206, and a heavy chain variable domain comprising: SEQ ID NO: 143, SEQ ID NO: 151, SEQ ID NO: 152, SEQ ID NO: 153, SEQ ID NO: 154, SEQ ID NO: 155, SEQ ID NO: 156, SEQ ID NO: 157, SEQ ID NO: 158, SEQ ID NO: 159, SEQ ID NO: 160, SEQ ID NO: 161, SEQ ID NO: 162, SEQ ID NO: 163, SEQ ID NO: 164, SEQ ID NO: 165, SEQ ID NO: 166, SEQ ID NO: 167, SEQ ID NO: 168, SEQ ID NO: 169, SEQ ID NO: 170, SEQ ID NO: 171, SEQ ID NO: 172, SEQ ID NO: 173, SEQ ID NO: 174, SEQ ID NO: 175, SEQ ID NO: 176, SEQ ID NO: 177, SEQ ID NO: 178, SEQ ID NO: 179, SEQ ID NO: 180, SEQ ID NO: 181, SEQ ID NO: 182, SEQ ID NO: 183, SEQ ID NO: 184, SEQ ID NO: 185, SEQ ID NO: 186, SEQ ID NO: 187, SEQ ID NO: 188, SEQ ID NO: 189, or SEQ ID NO: 190.

[0319] In some examples of any of the ABPCs described herein, the first antigen-binding domain includes a light chain variable domain comprising SEQ ID NO: 207, and a heavy chain variable domain comprising: SEQ ID NO: 143, SEQ ID NO: 151, SEQ ID NO: 152, SEQ ID NO: 153, SEQ ID NO: 154, SEQ ID NO: 155, SEQ ID NO: 156, SEQ ID NO: 157, SEQ ID NO: 158, SEQ ID NO: 159, SEQ ID NO: 160, SEQ ID NO: 161, SEQ ID NO: 162, SEQ ID NO: 163, SEQ ID NO: 164, SEQ ID NO: 165, SEQ ID NO: 166, SEQ ID NO: 167, SEQ ID NO: 168, SEQ ID NO: 169, SEQ ID NO: 170, SEQ ID NO: 171, SEQ ID NO: 172, SEQ ID NO: 173, SEQ ID NO: 174, SEQ ID NO: 175, SEQ ID NO: 176, SEQ ID NO: 177, SEQ ID NO: 178, SEQ ID NO: 179, SEQ ID NO: 180, SEQ ID NO: 181, SEQ ID NO: 182, SEQ ID NO: 183, SEQ ID NO: 184, SEQ ID NO: 185, SEQ ID NO: 186, SEQ ID NO: 187, SEQ ID NO: 188, SEQ ID NO: 189, or SEQ ID NO: 190.

[0320] In some examples of any of the ABPCs described herein, the first antigen-binding domain includes a light chain variable domain comprising SEQ ID NO: 208, and a heavy chain variable domain comprising: SEQ ID NO: 143, SEQ ID NO: 151, SEQ ID NO: 152, SEQ ID NO: 153, SEQ ID NO: 154, SEQ ID NO: 155, SEQ ID NO: 156, SEQ ID NO: 157, SEQ ID NO: 158, SEQ ID NO: 159, SEQ ID NO: 160, SEQ ID NO: 161, SEQ ID NO: 162, SEQ ID NO: 163, SEQ ID NO: 164, SEQ ID NO: 165, SEQ ID NO: 166, SEQ ID NO: 167, SEQ ID NO: 168, SEQ ID NO: 169, SEQ ID NO: 170, SEQ ID NO: 171, SEQ ID NO: 172, SEQ ID NO: 173, SEQ ID NO: 174, SEQ ID NO: 175, SEQ ID NO: 176, SEQ ID NO: 177, SEQ ID NO: 178, SEQ ID NO: 179, SEQ ID NO: 180, SEQ ID NO: 181, SEQ ID NO: 182, SEQ ID NO: 183, SEQ ID NO: 184, SEQ ID NO: 185, SEQ ID NO: 186, SEQ ID NO: 187, SEQ ID NO: 188, SEQ ID NO: 189, or SEQ ID NO: 190.

[0321] In some examples of any of the ABPCs described herein, the first antigen-binding domain includes a light chain variable domain comprising SEQ ID NO: 209, and a heavy chain variable domain comprising: SEQ ID NO: 143, SEQ ID NO: 151, SEQ ID NO: 152, SEQ ID NO: 153, SEQ ID NO: 154, SEQ ID NO: 155, SEQ ID NO: 156, SEQ ID NO: 157, SEQ ID NO: 158, SEQ ID NO: 159, SEQ ID NO: 160, SEQ ID NO: 161, SEQ ID NO: 162, SEQ ID NO: 163, SEQ ID NO: 164, SEQ ID NO: 165, SEQ ID NO: 166, SEQ ID NO: 167, SEQ ID NO: 168, SEQ ID NO: 169, SEQ ID NO: 170, SEQ ID NO: 171, SEQ ID NO: 172, SEQ ID NO: 173, SEQ ID NO: 174, SEQ ID NO: 175, SEQ ID NO: 176, SEQ ID NO: 177, SEQ ID NO: 178, SEQ ID NO: 179, SEQ ID NO: 180, SEQ ID NO: 181, SEQ ID NO: 182, SEQ ID NO: 183, SEQ ID NO: 184, SEQ ID NO: 185, SEQ ID NO: 186, SEQ ID NO: 187, SEQ ID NO: 188, SEQ ID NO: 189, or SEQ ID NO: 190.

[0322] In some examples of any of the ABPCs described herein, the first antigen-binding domain includes a light chain variable domain comprising SEQ ID NO: 210, and a heavy chain variable domain comprising: SEQ ID NO: 143, SEQ ID NO: 151, SEQ ID NO: 152, SEQ ID NO: 153, SEQ ID NO: 154, SEQ ID NO: 155, SEQ ID NO: 156, SEQ ID NO: 157, SEQ ID NO: 158, SEQ ID NO: 159, SEQ ID NO: 160, SEQ ID NO: 161, SEQ ID NO: 162, SEQ ID NO: 163, SEQ ID NO: 164, SEQ ID NO: 165, SEQ ID NO: 166, SEQ ID NO: 167, SEQ ID NO: 168, SEQ ID NO: 169, SEQ ID NO: 170, SEQ ID NO: 171, SEQ ID NO: 172, SEQ ID NO: 173, SEQ ID NO: 174, SEQ ID NO: 175, SEQ ID NO: 176, SEQ ID NO: 177, SEQ ID NO: 178, SEQ ID NO: 179, SEQ ID NO: 180, SEQ ID NO: 181, SEQ ID NO: 182, SEQ ID NO: 183, SEQ ID NO: 184, SEQ ID NO: 185, SEQ ID NO: 186, SEQ ID NO: 187, SEQ ID NO: 188, SEQ ID NO: 189, or SEQ ID NO: 190.

[0323] In some examples of any of the ABPCs described herein, the first antigen-binding domain includes a light chain variable domain comprising SEQ ID NO: 211, and a heavy chain variable domain comprising: SEQ ID NO: 143, SEQ ID NO: 151, SEQ ID NO: 152, SEQ ID NO: 153, SEQ ID NO: 154, SEQ ID NO: 155, SEQ ID NO: 156, SEQ ID NO: 157, SEQ ID NO: 158, SEQ ID NO: 159, SEQ ID NO: 160, SEQ ID NO: 161, SEQ ID NO: 162, SEQ ID NO: 163, SEQ ID NO: 164, SEQ ID NO: 165, SEQ ID NO: 166, SEQ ID NO: 167, SEQ ID NO: 168, SEQ ID NO: 169, SEQ ID NO: 170, SEQ ID NO: 171, SEQ ID NO: 172, SEQ ID NO: 173, SEQ ID NO: 174, SEQ ID NO: 175, SEQ ID NO: 176, SEQ ID NO: 177, SEQ ID NO: 178, SEQ ID NO: 179, SEQ ID NO: 180, SEQ ID NO: 181, SEQ ID NO: 182, SEQ ID NO: 183, SEQ ID NO: 184, SEQ ID NO: 185, SEQ ID NO: 186, SEQ ID NO: 187, SEQ ID NO: 188, SEQ ID NO: 189, or SEQ ID NO: 190.

[0324] In some examples of any of the ABPCs described herein, the first antigen-binding domain includes a light chain variable domain comprising SEQ ID NO: 212, and a heavy chain variable domain comprising: SEQ ID NO: 143, SEQ ID NO: 151, SEQ ID NO: 152, SEQ ID NO: 153, SEQ ID NO: 154, SEQ ID NO: 155, SEQ ID NO: 156, SEQ ID NO: 157, SEQ ID NO: 158, SEQ ID NO: 159, SEQ ID NO: 160, SEQ ID NO: 161, SEQ ID NO: 162, SEQ ID NO: 163, SEQ ID NO: 164, SEQ ID NO: 165, SEQ ID NO: 166, SEQ ID NO: 167, SEQ ID NO: 168, SEQ ID NO: 169, SEQ ID NO: 170, SEQ ID NO: 171, SEQ ID NO: 172, SEQ ID NO: 173, SEQ ID NO: 174, SEQ ID NO: 175, SEQ ID NO: 176, SEQ ID NO: 177, SEQ ID NO: 178, SEQ ID NO: 179, SEQ ID NO: 180, SEQ ID NO: 181, SEQ ID NO: 182, SEQ ID NO: 183, SEQ ID NO: 184, SEQ ID NO: 185, SEQ ID NO: 186, SEQ ID NO: 187, SEQ ID NO: 188, SEQ ID NO: 189, or SEQ ID NO: 190.

[0325] In some examples of any of the ABPCs described herein, the first antigen-binding domain includes a light chain variable domain comprising SEQ ID NO: 213, and a heavy chain variable domain comprising: SEQ ID NO: 143, SEQ ID NO: 151, SEQ ID NO: 152, SEQ ID NO: 153, SEQ ID NO: 154, SEQ ID NO: 155, SEQ ID NO: 156, SEQ ID NO: 157, SEQ ID NO: 158, SEQ ID NO: 159, SEQ ID NO: 160, SEQ ID NO: 161, SEQ ID NO: 162, SEQ ID NO: 163, SEQ ID NO: 164, SEQ ID NO: 165, SEQ ID NO: 166, SEQ ID NO: 167, SEQ ID NO: 168, SEQ ID NO: 169, SEQ ID NO: 170, SEQ ID NO: 171, SEQ ID NO: 172, SEQ ID NO: 173, SEQ ID NO: 174, SEQ ID NO: 175, SEQ ID NO: 176, SEQ ID NO: 177, SEQ ID NO: 178, SEQ ID NO: 179, SEQ ID NO: 180, SEQ ID NO: 181, SEQ ID NO: 182, SEQ ID NO: 183, SEQ ID NO: 184, SEQ ID NO: 185, SEQ ID NO: 186, SEQ ID NO: 187, SEQ ID NO: 188, SEQ ID NO: 189, or SEQ ID NO: 190.

[0326] In some examples of any of the ABPCs described herein, the first antigen-binding domain includes a light chain variable domain comprising SEQ ID NO: 214, and a heavy chain variable domain comprising: SEQ ID NO: 143, SEQ ID NO: 151, SEQ ID NO: 152, SEQ ID NO: 153, SEQ ID NO: 154, SEQ ID NO: 155, SEQ ID NO: 156, SEQ ID NO: 157, SEQ ID NO: 158, SEQ ID NO: 159, SEQ ID NO: 160, SEQ ID NO: 161, SEQ ID NO: 162, SEQ ID NO: 163, SEQ ID NO: 164, SEQ ID NO: 165, SEQ ID NO: 166, SEQ ID NO: 167, SEQ ID NO: 168, SEQ ID NO: 169, SEQ ID NO: 170, SEQ ID NO: 171, SEQ ID NO: 172, SEQ ID NO: 173, SEQ ID NO: 174, SEQ ID NO: 175, SEQ ID NO: 176, SEQ ID NO: 177, SEQ ID NO: 178, SEQ ID NO: 179, SEQ ID NO: 180, SEQ ID NO: 181, SEQ ID NO: 182, SEQ ID NO: 183, SEQ ID NO: 184, SEQ ID NO: 185, SEQ ID NO: 186, SEQ ID NO: 187, SEQ ID NO: 188, SEQ ID NO: 189, or SEQ ID NO: 190.

[0327] In some examples of any of the ABPCs described herein, the first antigen-binding domain includes a light chain variable domain comprising SEQ ID NO: 215, and a heavy chain variable domain comprising: SEQ ID NO: 143, SEQ ID NO: 151, SEQ ID NO: 152, SEQ ID NO: 153, SEQ ID NO: 154, SEQ ID NO: 155, SEQ ID NO: 156, SEQ ID NO: 157, SEQ ID NO: 158, SEQ ID NO: 159, SEQ ID NO: 160, SEQ ID NO: 161, SEQ ID NO: 162, SEQ ID NO: 163, SEQ ID NO: 164, SEQ ID NO: 165, SEQ ID NO: 166, SEQ ID NO: 167, SEQ ID NO: 168, SEQ ID NO: 169, SEQ ID NO: 170, SEQ ID NO: 171, SEQ ID NO: 172, SEQ ID NO: 173, SEQ ID NO: 174, SEQ ID NO: 175, SEQ ID NO: 176, SEQ ID NO: 177, SEQ ID NO: 178, SEQ ID NO: 179, SEQ ID NO: 180, SEQ ID NO: 181, SEQ ID NO: 182, SEQ ID NO: 183, SEQ ID NO: 184, SEQ ID NO: 185, SEQ ID NO: 186, SEQ ID NO: 187, SEQ ID NO: 188, SEQ ID NO: 189, or SEQ ID NO: 190.

[0328] In some examples of any of the ABPCs described herein, the first antigen-binding domain includes a light chain variable domain comprising SEQ ID NO: 216, and a heavy chain variable domain comprising: SEQ ID NO: 143, SEQ ID NO: 151, SEQ ID NO: 152, SEQ ID NO: 153, SEQ ID NO: 154, SEQ ID NO: 155, SEQ ID NO: 156, SEQ ID NO: 157, SEQ ID NO: 158, SEQ ID NO: 159, SEQ ID NO: 160, SEQ ID NO: 161, SEQ ID NO: 162, SEQ ID NO: 163, SEQ ID NO: 164, SEQ ID NO: 165, SEQ ID NO: 166, SEQ ID NO: 167, SEQ ID NO: 168, SEQ ID NO: 169, SEQ ID NO: 170, SEQ ID NO: 171, SEQ ID NO: 172, SEQ ID NO: 173, SEQ ID NO: 174, SEQ ID NO: 175, SEQ ID NO: 176, SEQ ID NO: 177, SEQ ID NO: 178, SEQ ID NO: 179, SEQ ID NO: 180, SEQ ID NO: 181, SEQ ID NO: 182, SEQ ID NO: 183, SEQ ID NO: 184, SEQ ID NO: 185, SEQ ID NO: 186, SEQ ID NO: 187, SEQ ID NO: 188, SEQ ID NO: 189, or SEQ ID NO: 190.

[0329] In some examples of any of the ABPCs described herein, the first antigen-binding domain includes a light chain variable domain comprising SEQ ID NO: 217, and a heavy chain variable domain comprising: SEQ ID NO: 143, SEQ ID NO: 151, SEQ ID NO: 152, SEQ ID NO: 153, SEQ ID NO: 154, SEQ ID NO: 155, SEQ ID NO: 156, SEQ ID NO: 157, SEQ ID NO: 158, SEQ ID NO: 159, SEQ ID NO: 160, SEQ ID NO: 161, SEQ ID NO: 162, SEQ ID NO: 163, SEQ ID NO: 164, SEQ ID NO: 165, SEQ ID NO: 166, SEQ ID NO: 167, SEQ ID NO: 168, SEQ ID NO: 169, SEQ ID NO: 170, SEQ ID NO: 171, SEQ ID NO: 172, SEQ ID NO: 173, SEQ ID NO: 174, SEQ ID NO: 175, SEQ ID NO: 176, SEQ ID NO: 177, SEQ ID NO: 178, SEQ ID NO: 179, SEQ ID NO: 180, SEQ ID NO: 181, SEQ ID NO: 182, SEQ ID NO: 183, SEQ ID NO: 184, SEQ ID NO: 185, SEQ ID NO: 186, SEQ ID NO: 187, SEQ ID NO: 188, SEQ ID NO: 189, or SEQ ID NO: 190.

[0330] In some examples of any of the ABPCs described herein, the first antigen-binding domain includes a light chain variable domain comprising SEQ ID NO: 218, and a heavy chain variable domain comprising: SEQ ID NO: 143, SEQ ID NO: 151, SEQ ID NO: 152, SEQ ID NO: 153, SEQ ID NO: 154, SEQ ID NO: 155, SEQ ID NO: 156, SEQ ID NO: 157, SEQ ID NO: 158, SEQ ID NO: 159, SEQ ID NO: 160, SEQ ID NO: 161, SEQ ID NO: 162, SEQ ID NO: 163, SEQ ID NO: 164, SEQ ID NO: 165, SEQ ID NO: 166, SEQ ID NO: 167, SEQ ID NO: 168, SEQ ID NO: 169, SEQ ID NO: 170, SEQ ID NO: 171, SEQ ID NO: 172, SEQ ID NO: 173, SEQ ID NO: 174, SEQ ID NO: 175, SEQ ID NO: 176, SEQ ID NO: 177, SEQ ID NO: 178, SEQ ID NO: 179, SEQ ID NO: 180, SEQ ID NO: 181, SEQ ID NO: 182, SEQ ID NO: 183, SEQ ID NO: 184, SEQ ID NO: 185, SEQ ID NO: 186, SEQ ID NO: 187, SEQ ID NO: 188, SEQ ID NO: 189, or SEQ ID NO: 190.

[0331] In some examples of any of the ABPCs described herein, the first antigen-binding domain includes a light chain variable domain comprising SEQ ID NO: 219, and a heavy chain variable domain comprising: SEQ ID NO: 143, SEQ ID NO: 151, SEQ ID NO: 152, SEQ ID NO: 153, SEQ ID NO: 154, SEQ ID NO: 155, SEQ ID NO: 156, SEQ ID NO: 157, SEQ ID NO: 158, SEQ ID NO: 159, SEQ ID NO: 160, SEQ ID NO: 161, SEQ ID NO: 162, SEQ ID NO: 163, SEQ ID NO: 164, SEQ ID NO: 165, SEQ ID NO: 166, SEQ ID NO: 167, SEQ ID NO: 168, SEQ ID NO: 169, SEQ ID NO: 170, SEQ ID NO: 171, SEQ ID NO: 172, SEQ ID NO: 173, SEQ ID NO: 174, SEQ ID NO: 175, SEQ ID NO: 176, SEQ ID NO: 177, SEQ ID NO: 178, SEQ ID NO: 179, SEQ ID NO: 180, SEQ ID NO: 181, SEQ ID NO: 182, SEQ ID NO: 183, SEQ ID NO: 184, SEQ ID NO: 185, SEQ ID NO: 186, SEQ ID NO: 187, SEQ ID NO: 188, SEQ ID NO: 189, or SEQ ID NO: 190.

[0332] In some examples of any of the ABPCs described herein, the first antigen-binding domain includes a light chain variable domain comprising SEQ ID NO: 220, and a heavy chain variable domain comprising: SEQ ID NO: 143, SEQ ID NO: 151, SEQ ID NO: 152, SEQ ID NO: 153, SEQ ID NO: 154, SEQ ID NO: 155, SEQ ID NO: 156, SEQ ID NO: 157, SEQ ID NO: 158, SEQ ID NO: 159, SEQ ID NO: 160, SEQ ID NO: 161, SEQ ID NO: 162, SEQ ID NO: 163, SEQ ID NO: 164, SEQ ID NO: 165, SEQ ID NO: 166, SEQ ID NO: 167, SEQ ID NO: 168, SEQ ID NO: 169, SEQ ID NO: 170, SEQ ID NO: 171, SEQ ID NO: 172, SEQ ID NO: 173, SEQ ID NO: 174, SEQ ID NO: 175, SEQ ID NO: 176, SEQ ID NO: 177, SEQ ID NO: 178, SEQ ID NO: 179, SEQ ID NO: 180, SEQ ID NO: 181, SEQ ID NO: 182, SEQ ID NO: 183, SEQ ID NO: 184, SEQ ID NO: 185, SEQ ID NO: 186, SEQ ID NO: 187, SEQ ID NO: 188, SEQ ID NO: 189, or SEQ ID NO: 190.

[0333] In some examples of any of the ABPCs described herein, the first antigen-binding domain includes a light chain variable domain comprising SEQ ID NO: 221, and a heavy chain variable domain comprising: SEQ ID NO: 143, SEQ ID NO: 151, SEQ ID NO: 152, SEQ ID NO: 153, SEQ ID NO: 154, SEQ ID NO: 155, SEQ ID NO: 156, SEQ ID NO: 157, SEQ ID NO: 158, SEQ ID NO: 159, SEQ ID NO: 160, SEQ ID NO: 161, SEQ ID NO: 162, SEQ ID NO: 163, SEQ ID NO: 164, SEQ ID NO: 165, SEQ ID NO: 166, SEQ ID NO: 167, SEQ ID NO: 168, SEQ ID NO: 169, SEQ ID NO: 170, SEQ ID NO: 171, SEQ ID NO: 172, SEQ ID NO: 173, SEQ ID NO: 174, SEQ ID NO: 175, SEQ ID NO: 176, SEQ ID NO: 177, SEQ ID NO: 178, SEQ ID NO: 179, SEQ ID NO: 180, SEQ ID NO: 181, SEQ ID NO: 182, SEQ ID NO: 183, SEQ ID NO: 184, SEQ ID NO: 185, SEQ ID NO: 186, SEQ ID NO: 187, SEQ ID NO: 188, SEQ ID NO: 189, or SEQ ID NO: 190.

[0334] In some examples of any of the ABPCs described herein, the first antigen-binding domain includes a light chain variable domain comprising SEQ ID NO: 222, and a heavy chain variable domain comprising: SEQ ID NO: 143, SEQ ID NO: 151, SEQ ID NO: 152, SEQ ID NO: 153, SEQ ID NO: 154, SEQ ID NO: 155, SEQ ID NO: 156, SEQ ID NO: 157, SEQ ID NO: 158, SEQ ID NO: 159, SEQ ID NO: 160, SEQ ID NO: 161, SEQ ID NO: 162, SEQ ID NO: 163, SEQ ID NO: 164, SEQ ID NO: 165, SEQ ID NO: 166, SEQ ID NO: 167, SEQ ID NO: 168, SEQ ID NO: 169, SEQ ID NO: 170, SEQ ID NO: 171, SEQ ID NO: 172, SEQ ID NO: 173, SEQ ID NO: 174, SEQ ID NO: 175, SEQ ID NO: 176, SEQ ID NO: 177, SEQ ID NO: 178, SEQ ID NO: 179, SEQ ID NO: 180, SEQ ID NO: 181, SEQ ID NO: 182, SEQ ID NO: 183, SEQ ID NO: 184, SEQ ID NO: 185, SEQ ID NO: 186, SEQ ID NO: 187, SEQ ID NO: 188, SEQ ID NO: 189, or SEQ ID NO: 190.

[0335] In some examples of any of the ABPCs described herein, the first antigen-binding domain includes a heavy chain variable domain of SEQ ID NO: 143, SEQ ID NO: 223, SEQ ID NO: 224, SEQ ID NO: 225, SEQ ID NO: 226, SEQ ID NO: 227, SEQ ID NO: 228, SEQ ID NO: 229, SEQ ID NO: 230, SEQ ID NO: 231, SEQ ID NO: 232, SEQ ID NO: 233, SEQ ID NO: 234, SEQ ID NO: 235, SEQ ID NO: 236, SEQ ID NO: 237, SEQ ID NO: 238, SEQ ID NO: 239, SEQ ID NO: 240, SEQ ID NO: 241, SEQ ID NO: 242, SEQ ID NO: 243, SEQ ID NO: 244, SEQ ID NO: 245, SEQ ID NO: 246, SEQ ID NO: 247, SEQ ID NO: 248, SEQ ID NO: 249, SEQ ID NO: 250, SEQ ID NO: 251, SEQ ID NO: 252, SEQ ID NO: 253, SEQ ID NO: 254, SEQ ID NO: 255, SEQ ID NO: 256, SEQ ID NO: 257, SEQ ID NO: 258, SEQ ID NO: 259, SEQ ID NO: 260, SEQ ID NO: 261, SEQ ID NO: 262, SEQ ID NO: 263, SEQ ID NO: 264, SEQ ID NO: 265, SEQ ID NO: 266, or SEQ ID NO: 267.

[0336] In some examples of any of the ABPCs described herein, the first antigen-binding domain includes a heavy chain variable domain comprising SEQ ID NO: 143, and a light chain variable domain comprising SEQ ID NO: 191, SEQ ID NO: 192, SEQ ID NO: 193, SEQ ID NO: 194, SEQ ID NO: 195, SEQ ID NO: 196, SEQ ID NO: 197, SEQ ID NO: 198, SEQ ID NO: 199, SEQ ID NO: 200, SEQ ID NO: 201, SEQ ID NO: 202, SEQ ID NO: 203, SEQ ID NO: 204, SEQ ID NO: 205, SEQ ID NO: 206, SEQ ID NO: 207, SEQ ID NO: 208, SEQ ID NO: 209, SEQ ID NO: 210, SEQ ID NO: 211, SEQ ID NO: 212, SEQ ID NO: 213, SEQ ID NO: 214, SEQ ID NO: 215, SEQ ID NO: 216, SEQ ID NO: 217, SEQ ID NO: 218, SEQ ID NO: 219, SEQ ID NO: 220, SEQ ID NO: 221, or SEQ ID NO: 222.

[0337] In some examples of any of the ABPCs described herein, the first antigen-binding domain includes a heavy chain variable domain comprising SEQ ID NO: 223, and a light chain variable domain comprising SEQ ID NO: 144, SEQ ID NO: 191, SEQ ID NO: 192, SEQ ID NO: 193, SEQ ID NO: 194, SEQ ID NO: 195, SEQ ID NO: 196, SEQ ID NO: 197, SEQ ID NO: 198, SEQ ID NO: 199, SEQ ID NO: 200, SEQ ID NO: 201, SEQ ID NO: 202, SEQ ID NO: 203, SEQ ID NO: 204, SEQ ID NO: 205, SEQ ID NO: 206, SEQ ID NO: 207, SEQ ID NO: 208, SEQ ID NO: 209, SEQ ID NO: 210, SEQ ID NO: 211, SEQ ID NO: 212, SEQ ID NO: 213, SEQ ID NO: 214, SEQ ID NO: 215, SEQ ID NO: 216, SEQ ID NO: 217, SEQ ID NO: 218, SEQ ID NO: 219, SEQ ID NO: 220, SEQ ID NO: 221, or SEQ ID NO: 222.

[0338] In some examples of any of the ABPCs described herein, the first antigen-binding domain includes a heavy chain variable domain comprising SEQ ID NO: 224, and a light chain variable domain comprising SEQ ID NO: 144, SEQ ID NO: 191, SEQ ID NO: 192, SEQ ID NO: 193, SEQ ID NO: 194, SEQ ID NO: 195, SEQ ID NO: 196, SEQ ID NO: 197, SEQ ID NO: 198, SEQ ID NO: 199, SEQ ID NO: 200, SEQ ID NO: 201, SEQ ID NO: 202, SEQ ID NO: 203, SEQ ID NO: 204, SEQ ID NO: 205, SEQ ID NO: 206, SEQ ID NO: 207, SEQ ID NO: 208, SEQ ID NO: 209, SEQ ID NO: 210, SEQ ID NO: 211, SEQ ID NO: 212, SEQ ID NO: 213, SEQ ID NO: 214, SEQ ID NO: 215, SEQ ID NO: 216, SEQ ID NO: 217, SEQ ID NO: 218, SEQ ID NO: 219, SEQ ID NO: 220, SEQ ID NO: 221, or SEQ ID NO: 222.

[0339] In some examples of any of the ABPCs described herein, the first antigen-binding domain includes a heavy chain variable domain comprising SEQ ID NO: 225, and a light chain variable domain comprising SEQ ID NO: 144, SEQ ID NO: 191, SEQ ID NO: 192, SEQ ID NO: 193, SEQ ID NO: 194, SEQ ID NO: 195, SEQ ID NO: 196, SEQ ID NO: 197, SEQ ID NO: 198, SEQ ID NO: 199, SEQ ID NO: 200, SEQ ID NO: 201, SEQ ID NO: 202, SEQ ID NO: 203, SEQ ID NO: 204, SEQ ID NO: 205, SEQ ID NO: 206, SEQ ID NO: 207, SEQ ID NO: 208, SEQ ID NO: 209, SEQ ID NO: 210, SEQ ID NO: 211, SEQ ID NO: 212, SEQ ID NO: 213, SEQ ID NO: 214, SEQ ID NO: 215, SEQ ID NO: 216, SEQ ID NO: 217, SEQ ID NO: 218, SEQ ID NO: 219, SEQ ID NO: 220, SEQ ID NO: 221, or SEQ ID NO: 222.

[0340] In some examples of any of the ABPCs described herein, the first antigen-binding domain includes a heavy chain variable domain comprising SEQ ID NO: 226, and a light chain variable domain comprising SEQ ID NO: 144, SEQ ID NO: 191, SEQ ID NO: 192, SEQ ID NO: 193, SEQ ID NO: 194, SEQ ID NO: 195, SEQ ID NO: 196, SEQ ID NO: 197, SEQ ID NO: 198, SEQ ID NO: 199, SEQ ID NO: 200, SEQ ID NO: 201, SEQ ID NO: 202, SEQ ID NO: 203, SEQ ID NO: 204, SEQ ID NO: 205, SEQ ID NO: 206, SEQ ID NO: 207, SEQ ID NO: 208, SEQ ID NO: 209, SEQ ID NO: 210, SEQ ID NO: 211, SEQ ID NO: 212, SEQ ID NO: 213, SEQ ID NO: 214, SEQ ID NO: 215, SEQ ID NO: 216, SEQ ID NO: 217, SEQ ID NO: 218, SEQ ID NO: 219, SEQ ID NO: 220, SEQ ID NO: 221, or SEQ ID NO: 222.

[0341] In some examples of any of the ABPCs described herein, the first antigen-binding domain includes a heavy chain variable domain comprising SEQ ID NO: 227, and a light chain variable domain comprising SEQ ID NO: 144, SEQ ID NO: 191, SEQ ID NO: 192, SEQ ID NO: 193, SEQ ID NO: 194, SEQ ID NO: 195, SEQ ID NO: 196, SEQ ID NO: 197, SEQ ID NO: 198, SEQ ID NO: 199, SEQ ID NO: 200, SEQ ID NO: 201, SEQ ID NO: 202, SEQ ID NO: 203, SEQ ID NO: 204, SEQ ID NO: 205, SEQ ID NO: 206, SEQ ID NO: 207, SEQ ID NO: 208, SEQ ID NO: 209, SEQ ID NO: 210, SEQ ID NO: 211, SEQ ID NO: 212, SEQ ID NO: 213, SEQ ID NO: 214, SEQ ID NO: 215, SEQ ID NO: 216, SEQ ID NO: 217, SEQ ID NO: 218, SEQ ID NO: 219, SEQ ID NO: 220, SEQ ID NO: 221, or SEQ ID NO: 222.

[0342] In some examples of any of the ABPCs described herein, the first antigen-binding domain includes a heavy chain variable domain comprising SEQ ID NO: 228, and a light chain variable domain comprising SEQ ID NO: 144, SEQ ID NO: 191, SEQ ID NO: 192, SEQ ID NO: 193, SEQ ID NO: 194, SEQ ID NO: 195, SEQ ID NO: 196, SEQ ID NO: 197, SEQ ID NO: 198, SEQ ID NO: 199, SEQ ID NO: 200, SEQ ID NO: 201, SEQ ID NO: 202, SEQ ID NO: 203, SEQ ID NO: 204, SEQ ID NO: 205, SEQ ID NO: 206, SEQ ID NO: 207, SEQ ID NO: 208, SEQ ID NO: 209, SEQ ID NO: 210, SEQ ID NO: 211, SEQ ID NO: 212, SEQ ID NO: 213, SEQ ID NO: 214, SEQ ID NO: 215, SEQ ID NO: 216, SEQ ID NO: 217, SEQ ID NO: 218, SEQ ID NO: 219, SEQ ID NO: 220, SEQ ID NO: 221, or SEQ ID NO: 222.

[0343] In some examples of any of the ABPCs described herein, the first antigen-binding domain includes a heavy chain variable domain comprising SEQ ID NO: 229, and a light chain variable domain comprising SEQ ID NO: 144, SEQ ID NO: 191, SEQ ID NO: 192, SEQ ID NO: 193, SEQ ID NO: 194, SEQ ID NO: 195, SEQ ID NO: 196, SEQ ID NO: 197, SEQ ID NO: 198, SEQ ID NO: 199, SEQ ID NO: 200, SEQ ID NO: 201, SEQ ID NO: 202, SEQ ID NO: 203, SEQ ID NO: 204, SEQ ID NO: 205, SEQ ID NO: 206, SEQ ID NO: 207, SEQ ID NO: 208, SEQ ID NO: 209, SEQ ID NO: 210, SEQ ID NO: 211, SEQ ID NO: 212, SEQ ID NO: 213, SEQ ID NO: 214, SEQ ID NO: 215, SEQ ID NO: 216, SEQ ID NO: 217, SEQ ID NO: 218, SEQ ID NO: 219, SEQ ID NO: 220, SEQ ID NO: 221, or SEQ ID NO: 222.

[0344] In some examples of any of the ABPCs described herein, the first antigen-binding domain includes a heavy chain variable domain comprising SEQ ID NO: 230, and a light chain variable domain comprising SEQ ID NO: 144, SEQ ID NO: 191, SEQ ID NO: 192, SEQ ID NO: 193, SEQ ID NO: 194, SEQ ID NO: 195, SEQ ID NO: 196, SEQ ID NO: 197, SEQ ID NO: 198, SEQ ID NO: 199, SEQ ID NO: 200, SEQ ID NO: 201, SEQ ID NO: 202, SEQ ID NO: 203, SEQ ID NO: 204, SEQ ID NO: 205, SEQ ID NO: 206, SEQ ID NO: 207, SEQ ID NO: 208, SEQ ID NO: 209, SEQ ID NO: 210, SEQ ID NO: 211, SEQ ID NO: 212, SEQ ID NO: 213, SEQ ID NO: 214, SEQ ID NO: 215, SEQ ID NO: 216, SEQ ID NO: 217, SEQ ID NO: 218, SEQ ID NO: 219, SEQ ID NO: 220, SEQ ID NO: 221, or SEQ ID NO: 222.

[0345] In some examples of any of the ABPCs described herein, the first antigen-binding domain includes a heavy chain variable domain comprising SEQ ID NO: 231, and a light chain variable domain comprising SEQ ID NO: 144, SEQ ID NO: 191, SEQ ID NO: 192, SEQ ID NO: 193, SEQ ID NO: 194, SEQ ID NO: 195, SEQ ID NO: 196, SEQ ID NO: 197, SEQ ID NO: 198, SEQ ID NO: 199, SEQ ID NO: 200, SEQ ID NO: 201, SEQ ID NO: 202, SEQ ID NO: 203, SEQ ID NO: 204, SEQ ID NO: 205, SEQ ID NO: 206, SEQ ID NO: 207, SEQ ID NO: 208, SEQ ID NO: 209, SEQ ID NO: 210, SEQ ID NO: 211, SEQ ID NO: 212, SEQ ID NO: 213, SEQ ID NO: 214, SEQ ID NO: 215, SEQ ID NO: 216, SEQ ID NO: 217, SEQ ID NO: 218, SEQ ID NO: 219, SEQ ID NO: 220, SEQ ID NO: 221, or SEQ ID NO: 222.

[0346] In some examples of any of the ABPCs described herein, the first antigen-binding domain includes a heavy chain variable domain comprising SEQ ID NO: 232, and a light chain variable domain comprising SEQ ID NO: 144, SEQ ID NO: 191, SEQ ID NO: 192, SEQ ID NO: 193, SEQ ID NO: 194, SEQ ID NO: 195, SEQ ID NO: 196, SEQ ID NO: 197, SEQ ID NO: 198, SEQ ID NO: 199, SEQ ID NO: 200, SEQ ID NO: 201, SEQ ID NO: 202, SEQ ID NO: 203, SEQ ID NO: 204, SEQ ID NO: 205, SEQ ID NO: 206, SEQ ID NO: 207, SEQ ID NO: 208, SEQ ID NO: 209, SEQ ID NO: 210, SEQ ID NO: 211, SEQ ID NO: 212, SEQ ID NO: 213, SEQ ID NO: 214, SEQ ID NO: 215, SEQ ID NO: 216, SEQ ID NO: 217, SEQ ID NO: 218, SEQ ID NO: 219, SEQ ID NO: 220, SEQ ID NO: 221, or SEQ ID NO: 222.

[0347] In some examples of any of the ABPCs described herein, the first antigen-binding domain includes a heavy chain variable domain comprising SEQ ID NO: 233, and a light chain variable domain comprising SEQ ID NO: 144, SEQ ID NO: 191, SEQ ID NO: 192, SEQ ID NO: 193, SEQ ID NO: 194, SEQ ID NO: 195, SEQ ID NO: 196, SEQ ID NO: 197, SEQ ID NO: 198, SEQ ID NO: 199, SEQ ID NO: 200, SEQ ID NO: 201, SEQ ID NO: 202, SEQ ID NO: 203, SEQ ID NO: 204, SEQ ID NO: 205, SEQ ID NO: 206, SEQ ID NO: 207, SEQ ID NO: 208, SEQ ID NO: 209, SEQ ID NO: 210, SEQ ID NO: 211, SEQ ID NO: 212, SEQ ID NO: 213, SEQ ID NO: 214, SEQ ID NO: 215, SEQ ID NO: 216, SEQ ID NO: 217, SEQ ID NO: 218, SEQ ID NO: 219, SEQ ID NO: 220, SEQ ID NO: 221, or SEQ ID NO: 222.

[0348] In some examples of any of the ABPCs described herein, the first antigen-binding domain includes a heavy chain variable domain comprising SEQ ID NO: 234, and a light chain variable domain comprising SEQ ID NO: 144, SEQ ID NO: 191, SEQ ID NO: 192, SEQ ID NO: 193, SEQ ID NO: 194, SEQ ID NO: 195, SEQ ID NO: 196, SEQ ID NO: 197, SEQ ID NO: 198, SEQ ID NO: 199, SEQ ID NO: 200, SEQ ID NO: 201, SEQ ID NO: 202, SEQ ID NO: 203, SEQ ID NO: 204, SEQ ID NO: 205, SEQ ID NO: 206, SEQ ID NO: 207, SEQ ID NO: 208, SEQ ID NO: 209, SEQ ID NO: 210, SEQ ID NO: 211, SEQ ID NO: 212, SEQ ID NO: 213, SEQ ID NO: 214, SEQ ID NO: 215, SEQ ID NO: 216, SEQ ID NO: 217, SEQ ID NO: 218, SEQ ID NO: 219, SEQ ID NO: 220, SEQ ID NO: 221, or SEQ ID NO: 222.

[0349] In some examples of any of the ABPCs described herein, the first antigen-binding domain includes a heavy chain variable domain comprising SEQ ID NO: 235, and a light chain variable domain comprising SEQ ID NO: 144, SEQ ID NO: 191, SEQ ID NO: 192, SEQ ID NO: 193, SEQ ID NO: 194, SEQ ID NO: 195, SEQ ID NO: 196, SEQ ID NO: 197, SEQ ID NO: 198, SEQ ID NO: 199, SEQ ID NO: 200, SEQ ID NO: 201, SEQ ID NO: 202, SEQ ID NO: 203, SEQ ID NO: 204, SEQ ID NO: 205, SEQ ID NO: 206, SEQ ID NO: 207, SEQ ID NO: 208, SEQ ID NO: 209, SEQ ID NO: 210, SEQ ID NO: 211, SEQ ID NO: 212, SEQ ID NO: 213, SEQ ID NO: 214, SEQ ID NO: 215, SEQ ID NO: 216, SEQ ID NO: 217, SEQ ID NO: 218, SEQ ID NO: 219, SEQ ID NO: 220, SEQ ID NO: 221, or SEQ ID NO: 222.

[0350] In some examples of any of the ABPCs described herein, the first antigen-binding domain includes a heavy chain variable domain comprising SEQ ID NO: 236, and a light chain variable domain comprising SEQ ID NO: 144, SEQ ID NO: 191, SEQ ID NO: 192, SEQ ID NO: 193, SEQ ID NO: 194, SEQ ID NO: 195, SEQ ID NO: 196, SEQ ID NO: 197, SEQ ID NO: 198, SEQ ID NO: 199, SEQ ID NO: 200, SEQ ID NO: 201, SEQ ID NO: 202, SEQ ID NO: 203, SEQ ID NO: 204, SEQ ID NO: 205, SEQ ID NO: 206, SEQ ID NO: 207, SEQ ID NO: 208, SEQ ID NO: 209, SEQ ID NO: 210, SEQ ID NO: 211, SEQ ID NO: 212, SEQ ID NO: 213, SEQ ID NO: 214, SEQ ID NO: 215, SEQ ID NO: 216, SEQ ID NO: 217, SEQ ID NO: 218, SEQ ID NO: 219, SEQ ID NO: 220, SEQ ID NO: 221, or SEQ ID NO: 222.

[0351] In some examples of any of the ABPCs described herein, the first antigen-binding domain includes a heavy chain variable domain comprising SEQ ID NO: 237, and a light chain variable domain comprising SEQ ID NO: 144, SEQ ID NO: 191, SEQ ID NO: 192, SEQ ID NO: 193, SEQ ID NO: 194, SEQ ID NO: 195, SEQ ID NO: 196, SEQ ID NO: 197, SEQ ID NO: 198, SEQ ID NO: 199, SEQ ID NO: 200, SEQ ID NO: 201, SEQ ID NO: 202, SEQ ID NO: 203, SEQ ID NO: 204, SEQ ID NO: 205, SEQ ID NO: 206, SEQ ID NO: 207, SEQ ID NO: 208, SEQ ID NO: 209, SEQ ID NO: 210, SEQ ID NO: 211, SEQ ID NO: 212, SEQ ID NO: 213, SEQ ID NO: 214, SEQ ID NO: 215, SEQ ID NO: 216, SEQ ID NO: 217, SEQ ID NO: 218, SEQ ID NO: 219, SEQ ID NO: 220, SEQ ID NO: 221, or SEQ ID NO: 222.

[0352] In some examples of any of the ABPCs described herein, the first antigen-binding domain includes a heavy chain variable domain comprising SEQ ID NO: 238, and a light chain variable domain comprising SEQ ID NO: 144, SEQ ID NO: 191, SEQ ID NO: 192, SEQ ID NO: 193, SEQ ID NO: 194, SEQ ID NO: 195, SEQ ID NO: 196, SEQ ID NO: 197, SEQ ID NO: 198, SEQ ID NO: 199, SEQ ID NO: 200, SEQ ID NO: 201, SEQ ID NO: 202, SEQ ID NO: 203, SEQ ID NO: 204, SEQ ID NO: 205, SEQ ID NO: 206, SEQ ID NO: 207, SEQ ID NO: 208, SEQ ID NO: 209, SEQ ID NO: 210, SEQ ID NO: 211, SEQ ID NO: 212, SEQ ID NO: 213, SEQ ID NO: 214, SEQ ID NO: 215, SEQ ID NO: 216, SEQ ID NO: 217, SEQ ID NO: 218, SEQ ID NO: 219, SEQ ID NO: 220, SEQ ID NO: 221, or SEQ ID NO: 222.

[0353] In some examples of any of the ABPCs described herein, the first antigen-binding domain includes a heavy chain variable domain comprising SEQ ID NO: 239, and a light chain variable domain comprising SEQ ID NO: 144, SEQ ID NO: 191, SEQ ID NO: 192, SEQ ID NO: 193, SEQ ID NO: 194, SEQ ID NO: 195, SEQ ID NO: 196, SEQ ID NO: 197, SEQ ID NO: 198, SEQ ID NO: 199, SEQ ID NO: 200, SEQ ID NO: 201, SEQ ID NO: 202, SEQ ID NO: 203, SEQ ID NO: 204, SEQ ID NO: 205, SEQ ID NO: 206, SEQ ID NO: 207, SEQ ID NO: 208, SEQ ID NO: 209, SEQ ID NO: 210, SEQ ID NO: 211, SEQ ID NO: 212, SEQ ID NO: 213, SEQ ID NO: 214, SEQ ID NO: 215, SEQ ID NO: 216, SEQ ID NO: 217, SEQ ID NO: 218, SEQ ID NO: 219, SEQ ID NO: 220, SEQ ID NO: 221, or SEQ ID NO: 222.

[0354] In some examples of any of the ABPCs described herein, the first antigen-binding domain includes a heavy chain variable domain comprising SEQ ID NO: 240, and a light chain variable domain comprising SEQ ID NO: 144, SEQ ID NO: 191, SEQ ID NO: 192, SEQ ID NO: 193, SEQ ID NO: 194, SEQ ID NO: 195, SEQ ID NO: 196, SEQ ID NO: 197, SEQ ID NO: 198, SEQ ID NO: 199, SEQ ID NO: 200, SEQ ID NO: 201, SEQ ID NO: 202, SEQ ID NO: 203, SEQ ID NO: 204, SEQ ID NO: 205, SEQ ID NO: 206, SEQ ID NO: 207, SEQ ID NO: 208, SEQ ID NO: 209, SEQ ID NO: 210, SEQ ID NO: 211, SEQ ID NO: 212, SEQ ID NO: 213, SEQ ID NO: 214, SEQ ID NO: 215, SEQ ID NO: 216, SEQ ID NO: 217, SEQ ID NO: 218, SEQ ID NO: 219, SEQ ID NO: 220, SEQ ID NO: 221, or SEQ ID NO: 222.

[0355] In some examples of any of the ABPCs described herein, the first antigen-binding domain includes a heavy chain variable domain comprising SEQ ID NO: 241, and a light chain variable domain comprising SEQ ID NO: 144, SEQ ID NO: 191, SEQ ID NO: 192, SEQ ID NO: 193, SEQ ID NO: 194, SEQ ID NO: 195, SEQ ID NO: 196, SEQ ID NO: 197, SEQ ID NO: 198, SEQ ID NO: 199, SEQ ID NO: 200, SEQ ID NO: 201, SEQ ID NO: 202, SEQ ID NO: 203, SEQ ID NO: 204, SEQ ID NO: 205, SEQ ID NO: 206, SEQ ID NO: 207, SEQ ID NO: 208, SEQ ID NO: 209, SEQ ID NO: 210, SEQ ID NO: 211, SEQ ID NO: 212, SEQ ID NO: 213, SEQ ID NO: 214, SEQ ID NO: 215, SEQ ID NO: 216, SEQ ID NO: 217, SEQ ID NO: 218, SEQ ID NO: 219, SEQ ID NO: 220, SEQ ID NO: 221, or SEQ ID NO: 222.

[0356] In some examples of any of the ABPCs described herein, the first antigen-binding domain includes a heavy chain variable domain comprising SEQ ID NO: 242, and a light chain variable domain comprising SEQ ID NO: 144, SEQ ID NO: 191, SEQ ID NO: 192, SEQ ID NO: 193, SEQ ID NO: 194, SEQ ID NO: 195, SEQ ID NO: 196, SEQ ID NO: 197, SEQ ID NO: 198, SEQ ID NO: 199, SEQ ID NO: 200, SEQ ID NO: 201, SEQ ID NO: 202, SEQ ID NO: 203, SEQ ID NO: 204, SEQ ID NO: 205, SEQ ID NO: 206, SEQ ID NO: 207, SEQ ID NO: 208, SEQ ID NO: 209, SEQ ID NO: 210, SEQ ID NO: 211, SEQ ID NO: 212, SEQ ID NO: 213, SEQ ID NO: 214, SEQ ID NO: 215, SEQ ID NO: 216, SEQ ID NO: 217, SEQ ID NO: 218, SEQ ID NO: 219, SEQ ID NO: 220, SEQ ID NO: 221, or SEQ ID NO: 222.

[0357] In some examples of any of the ABPCs described herein, the first antigen-binding domain includes a heavy chain variable domain comprising SEQ ID NO: 243, and a light chain variable domain comprising SEQ ID NO: 144, SEQ ID NO: 191, SEQ ID NO: 192, SEQ ID NO: 193, SEQ ID NO: 194, SEQ ID NO: 195, SEQ ID NO: 196, SEQ ID NO: 197, SEQ ID NO: 198, SEQ ID NO: 199, SEQ ID NO: 200, SEQ ID NO: 201, SEQ ID NO: 202, SEQ ID NO: 203, SEQ ID NO: 204, SEQ ID NO: 205, SEQ ID NO: 206, SEQ ID NO: 207, SEQ ID NO: 208, SEQ ID NO: 209, SEQ ID NO: 210, SEQ ID NO: 211, SEQ ID NO: 212, SEQ ID NO: 213, SEQ ID NO: 214, SEQ ID NO: 215, SEQ ID NO: 216, SEQ ID NO: 217, SEQ ID NO: 218, SEQ ID NO: 219, SEQ ID NO: 220, SEQ ID NO: 221, or SEQ ID NO: 222.

[0358] In some examples of any of the ABPCs described herein, the first antigen-binding domain includes a heavy chain variable domain comprising SEQ ID NO: 244, and a light chain variable domain comprising SEQ ID NO: 144, SEQ ID NO: 191, SEQ ID NO: 192, SEQ ID NO: 193, SEQ ID NO: 194, SEQ ID NO: 195, SEQ ID NO: 196, SEQ ID NO: 197, SEQ ID NO: 198, SEQ ID NO: 199, SEQ ID NO: 200, SEQ ID NO: 201, SEQ ID NO: 202, SEQ ID NO: 203, SEQ ID NO: 204, SEQ ID NO: 205, SEQ ID NO: 206, SEQ ID NO: 207, SEQ ID NO: 208, SEQ ID NO: 209, SEQ ID NO: 210, SEQ ID NO: 211, SEQ ID NO: 212, SEQ ID NO: 213, SEQ ID NO: 214, SEQ ID NO: 215, SEQ ID NO: 216, SEQ ID NO: 217, SEQ ID NO: 218, SEQ ID NO: 219, SEQ ID NO: 220, SEQ ID NO: 221, or SEQ ID NO: 222.

[0359] In some examples of any of the ABPCs described herein, the first antigen-binding domain includes a heavy chain variable domain comprising SEQ ID NO: 245, and a light chain variable domain comprising SEQ ID NO: 144, SEQ ID NO: 191, SEQ ID NO: 192, SEQ ID NO: 193, SEQ ID NO: 194, SEQ ID NO: 195, SEQ ID NO: 196, SEQ ID NO: 197, SEQ ID NO: 198, SEQ ID NO: 199, SEQ ID NO: 200, SEQ ID NO: 201, SEQ ID NO: 202, SEQ ID NO: 203, SEQ ID NO: 204, SEQ ID NO: 205, SEQ ID NO: 206, SEQ ID NO: 207, SEQ ID NO: 208, SEQ ID NO: 209, SEQ ID NO: 210, SEQ ID NO: 211, SEQ ID NO: 212, SEQ ID NO: 213, SEQ ID NO: 214, SEQ ID NO: 215, SEQ ID NO: 216, SEQ ID NO: 217, SEQ ID NO: 218, SEQ ID NO: 219, SEQ ID NO: 220, SEQ ID NO: 221, or SEQ ID NO: 222.

[0360] In some examples of any of the ABPCs described herein, the first antigen-binding domain includes a heavy chain variable domain comprising SEQ ID NO: 246, and a light chain variable domain comprising SEQ ID NO: 144, SEQ ID NO: 191, SEQ ID NO: 192, SEQ ID NO: 193, SEQ ID NO: 194, SEQ ID NO: 195, SEQ ID NO: 196, SEQ ID NO: 197, SEQ ID NO: 198, SEQ ID NO: 199, SEQ ID NO: 200, SEQ ID NO: 201, SEQ ID NO: 202, SEQ ID NO: 203, SEQ ID NO: 204, SEQ ID NO: 205, SEQ ID NO: 206, SEQ ID NO: 207, SEQ ID NO: 208, SEQ ID NO: 209, SEQ ID NO: 210, SEQ ID NO: 211, SEQ ID NO: 212, SEQ ID NO: 213, SEQ ID NO: 214, SEQ ID NO: 215, SEQ ID NO: 216, SEQ ID NO: 217, SEQ ID NO: 218, SEQ ID NO: 219, SEQ ID NO: 220, SEQ ID NO: 221, or SEQ ID NO: 222.

[0361] In some examples of any of the ABPCs described herein, the first antigen-binding domain includes a heavy chain variable domain comprising SEQ ID NO: 247, and a light chain variable domain comprising SEQ ID NO: 144, SEQ ID NO: 191, SEQ ID NO: 192, SEQ ID NO: 193, SEQ ID NO: 194, SEQ ID NO: 195, SEQ ID NO: 196, SEQ ID NO: 197, SEQ ID NO: 198, SEQ ID NO: 199, SEQ ID NO: 200, SEQ ID NO: 201, SEQ ID NO: 202, SEQ ID NO: 203, SEQ ID NO: 204, SEQ ID NO: 205, SEQ ID NO: 206, SEQ ID NO: 207, SEQ ID NO: 208, SEQ ID NO: 209, SEQ ID NO: 210, SEQ ID NO: 211, SEQ ID NO: 212, SEQ ID NO: 213, SEQ ID NO: 214, SEQ ID NO: 215, SEQ ID NO: 216, SEQ ID NO: 217, SEQ ID NO: 218, SEQ ID NO: 219, SEQ ID NO: 220, SEQ ID NO: 221, or SEQ ID NO: 222.

[0362] In some examples of any of the ABPCs described herein, the first antigen-binding domain includes a heavy chain variable domain comprising SEQ ID NO: 248, and a light chain variable domain comprising SEQ ID NO: 144, SEQ ID NO: 191, SEQ ID NO: 192, SEQ ID NO: 193, SEQ ID NO: 194, SEQ ID NO: 195, SEQ ID NO: 196, SEQ ID NO: 197, SEQ ID NO: 198, SEQ ID NO: 199, SEQ ID NO: 200, SEQ ID NO: 201, SEQ ID NO: 202, SEQ ID NO: 203, SEQ ID NO: 204, SEQ ID NO: 205, SEQ ID NO: 206, SEQ ID NO: 207, SEQ ID NO: 208, SEQ ID NO: 209, SEQ ID NO: 210, SEQ ID NO: 211, SEQ ID NO: 212, SEQ ID NO: 213, SEQ ID NO: 214, SEQ ID NO: 215, SEQ ID NO: 216, SEQ ID NO: 217, SEQ ID NO: 218, SEQ ID NO: 219, SEQ ID NO: 220, SEQ ID NO: 221, or SEQ ID NO: 222.

[0363] In some examples of any of the ABPCs described herein, the first antigen-binding domain includes a heavy chain variable domain comprising SEQ ID NO: 249, and a light chain variable domain comprising SEQ ID NO: 144, SEQ ID NO: 191, SEQ ID NO: 192, SEQ ID NO: 193, SEQ ID NO: 194, SEQ ID NO: 195, SEQ ID NO: 196, SEQ ID NO: 197, SEQ ID NO: 198, SEQ ID NO: 199, SEQ ID NO: 200, SEQ ID NO: 201, SEQ ID NO: 202, SEQ ID NO: 203, SEQ ID NO: 204, SEQ ID NO: 205, SEQ ID NO: 206, SEQ ID NO: 207, SEQ ID NO: 208, SEQ ID NO: 209, SEQ ID NO: 210, SEQ ID NO: 211, SEQ ID NO: 212, SEQ ID NO: 213, SEQ ID NO: 214, SEQ ID NO: 215, SEQ ID NO: 216, SEQ ID NO: 217, SEQ ID NO: 218, SEQ ID NO: 219, SEQ ID NO: 220, SEQ ID NO: 221, or SEQ ID NO: 222.

[0364] In some examples of any of the ABPCs described herein, the first antigen-binding domain includes a heavy chain variable domain comprising SEQ ID NO: 250, and a light chain variable domain comprising SEQ ID NO: 144, SEQ ID NO: 191, SEQ ID NO: 192, SEQ ID NO: 193, SEQ ID NO: 194, SEQ ID NO: 195, SEQ ID NO: 196, SEQ ID NO: 197, SEQ ID NO: 198, SEQ ID NO: 199, SEQ ID NO: 200, SEQ ID NO: 201, SEQ ID NO: 202, SEQ ID NO: 203, SEQ ID NO: 204, SEQ ID NO: 205, SEQ ID NO: 206, SEQ ID NO: 207, SEQ ID NO: 208, SEQ ID NO: 209, SEQ ID NO: 210, SEQ ID NO: 211, SEQ ID NO: 212, SEQ ID NO: 213, SEQ ID NO: 214, SEQ ID NO: 215, SEQ ID NO: 216, SEQ ID NO: 217, SEQ ID NO: 218, SEQ ID NO: 219, SEQ ID NO: 220, SEQ ID NO: 221, or SEQ ID NO: 222.

[0365] In some examples of any of the ABPCs described herein, the first antigen-binding domain includes a heavy chain variable domain comprising SEQ ID NO: 251, and a light chain variable domain comprising SEQ ID NO: 144, SEQ ID NO: 191, SEQ ID NO: 192, SEQ ID NO: 193, SEQ ID NO: 194, SEQ ID NO: 195, SEQ ID NO: 196, SEQ ID NO: 197, SEQ ID NO: 198, SEQ ID NO: 199, SEQ ID NO: 200, SEQ ID NO: 201, SEQ ID NO: 202, SEQ ID NO: 203, SEQ ID NO: 204, SEQ ID NO: 205, SEQ ID NO: 206, SEQ ID NO: 207, SEQ ID NO: 208, SEQ ID NO: 209, SEQ ID NO: 210, SEQ ID NO: 211, SEQ ID NO: 212, SEQ ID NO: 213, SEQ ID NO: 214, SEQ ID NO: 215, SEQ ID NO: 216, SEQ ID NO: 217, SEQ ID NO: 218, SEQ ID NO: 219, SEQ ID NO: 220, SEQ ID NO: 221, or SEQ ID NO: 222.

[0366] In some examples of any of the ABPCs described herein, the first antigen-binding domain includes a heavy chain variable domain comprising SEQ ID NO: 252, and a light chain variable domain comprising SEQ ID NO: 144, SEQ ID NO: 191, SEQ ID NO: 192, SEQ ID NO: 193, SEQ ID NO: 194, SEQ ID NO: 195, SEQ ID NO: 196, SEQ ID NO: 197, SEQ ID NO: 198, SEQ ID NO: 199, SEQ ID NO: 200, SEQ ID NO: 201, SEQ ID NO: 202, SEQ ID NO: 203, SEQ ID NO: 204, SEQ ID NO: 205, SEQ ID NO: 206, SEQ ID NO: 207, SEQ ID NO: 208, SEQ ID NO: 209, SEQ ID NO: 210, SEQ ID NO: 211, SEQ ID NO: 212, SEQ ID NO: 213, SEQ ID NO: 214, SEQ ID NO: 215, SEQ ID NO: 216, SEQ ID NO: 217, SEQ ID NO: 218, SEQ ID NO: 219, SEQ ID NO: 220, SEQ ID NO: 221, or SEQ ID NO: 222.

[0367] In some examples of any of the ABPCs described herein, the first antigen-binding domain includes a heavy chain variable domain comprising SEQ ID NO: 253, and a light chain variable domain comprising SEQ ID NO: 144, SEQ ID NO: 191, SEQ ID NO: 192, SEQ ID NO: 193, SEQ ID NO: 194, SEQ ID NO: 195, SEQ ID NO: 196, SEQ ID NO: 197, SEQ ID NO: 198, SEQ ID NO: 199, SEQ ID NO: 200, SEQ ID NO: 201, SEQ ID NO: 202, SEQ ID NO: 203, SEQ ID NO: 204, SEQ ID NO: 205, SEQ ID NO: 206, SEQ ID NO: 207, SEQ ID NO: 208, SEQ ID NO: 209, SEQ ID NO: 210, SEQ ID NO: 211, SEQ ID NO: 212, SEQ ID NO: 213, SEQ ID NO: 214, SEQ ID NO: 215, SEQ ID NO: 216, SEQ ID NO: 217, SEQ ID NO: 218, SEQ ID NO: 219, SEQ ID NO: 220, SEQ ID NO: 221, or SEQ ID NO: 222.

[0368] In some examples of any of the ABPCs described herein, the first antigen-binding domain includes a heavy chain variable domain comprising SEQ ID NO: 254, and a light chain variable domain comprising SEQ ID NO: 144, SEQ ID NO: 191, SEQ ID NO: 192, SEQ ID NO: 193, SEQ ID NO: 194, SEQ ID NO: 195, SEQ ID NO: 196, SEQ ID NO: 197, SEQ ID NO: 198, SEQ ID NO: 199, SEQ ID NO: 200, SEQ ID NO: 201, SEQ ID NO: 202, SEQ ID NO: 203, SEQ ID NO: 204, SEQ ID NO: 205, SEQ ID NO: 206, SEQ ID NO: 207, SEQ ID NO: 208, SEQ ID NO: 209, SEQ ID NO: 210, SEQ ID NO: 211, SEQ ID NO: 212, SEQ ID NO: 213, SEQ ID NO: 214, SEQ ID NO: 215, SEQ ID NO: 216, SEQ ID NO: 217, SEQ ID NO: 218, SEQ ID NO: 219, SEQ ID NO: 220, SEQ ID NO: 221, or SEQ ID NO: 222.

[0369] In some examples of any of the ABPCs described herein, the first antigen-binding domain includes a heavy chain variable domain comprising SEQ ID NO: 255, and a light chain variable domain comprising SEQ ID NO: 144, SEQ ID NO: 191, SEQ ID NO: 192, SEQ ID NO: 193, SEQ ID NO: 194, SEQ ID NO: 195, SEQ ID NO: 196, SEQ ID NO: 197, SEQ ID NO: 198, SEQ ID NO: 199, SEQ ID NO: 200, SEQ ID NO: 201, SEQ ID NO: 202, SEQ ID NO: 203, SEQ ID NO: 204, SEQ ID NO: 205, SEQ ID NO: 206, SEQ ID NO: 207, SEQ ID NO: 208, SEQ ID NO: 209, SEQ ID NO: 210, SEQ ID NO: 211, SEQ ID NO: 212, SEQ ID NO: 213, SEQ ID NO: 214, SEQ ID NO: 215, SEQ ID NO: 216, SEQ ID NO: 217, SEQ ID NO: 218, SEQ ID NO: 219, SEQ ID NO: 220, SEQ ID NO: 221, or SEQ ID NO: 222.

[0370] In some examples of any of the ABPCs described herein, the first antigen-binding domain includes a heavy chain variable domain comprising SEQ ID NO: 256, and a light chain variable domain comprising SEQ ID NO: 144, SEQ ID NO: 191, SEQ ID NO: 192, SEQ ID NO: 193, SEQ ID NO: 194, SEQ ID NO: 195, SEQ ID NO: 196, SEQ ID NO: 197, SEQ ID NO: 198, SEQ ID NO: 199, SEQ ID NO: 200, SEQ ID NO: 201, SEQ ID NO: 202, SEQ ID NO: 203, SEQ ID NO: 204, SEQ ID NO: 205, SEQ ID NO: 206, SEQ ID NO: 207, SEQ ID NO: 208, SEQ ID NO: 209, SEQ ID NO: 210, SEQ ID NO: 211, SEQ ID NO: 212, SEQ ID NO: 213, SEQ ID NO: 214, SEQ ID NO: 215, SEQ ID NO: 216, SEQ ID NO: 217, SEQ ID NO: 218, SEQ ID NO: 219, SEQ ID NO: 220, SEQ ID NO: 221, or SEQ ID NO: 222.

[0371] In some examples of any of the ABPCs described herein, the first antigen-binding domain includes a heavy chain variable domain comprising SEQ ID NO: 257, and a light chain variable domain comprising SEQ ID NO: 144, SEQ ID NO: 191, SEQ ID NO: 192, SEQ ID NO: 193, SEQ ID NO: 194, SEQ ID NO: 195, SEQ ID NO: 196, SEQ ID NO: 197, SEQ ID NO: 198, SEQ ID NO: 199, SEQ ID NO: 200, SEQ ID NO: 201, SEQ ID NO: 202, SEQ ID NO: 203, SEQ ID NO: 204, SEQ ID NO: 205, SEQ ID NO: 206, SEQ ID NO: 207, SEQ ID NO: 208, SEQ ID NO: 209, SEQ ID NO: 210, SEQ ID NO: 211, SEQ ID NO: 212, SEQ ID NO: 213, SEQ ID NO: 214, SEQ ID NO: 215, SEQ ID NO: 216, SEQ ID NO: 217, SEQ ID NO: 218, SEQ ID NO: 219, SEQ ID NO: 220, SEQ ID NO: 221, or SEQ ID NO: 222.

[0372] In some examples of any of the ABPCs described herein, the first antigen-binding domain includes a heavy chain variable domain comprising SEQ ID NO: 258, and a light chain variable domain comprising SEQ ID NO: 144, SEQ ID NO: 191, SEQ ID NO: 192, SEQ ID NO: 193, SEQ ID NO: 194, SEQ ID NO: 195, SEQ ID NO: 196, SEQ ID NO: 197, SEQ ID NO: 198, SEQ ID NO: 199, SEQ ID NO: 200, SEQ ID NO: 201, SEQ ID NO: 202, SEQ ID NO: 203, SEQ ID NO: 204, SEQ ID NO: 205, SEQ ID NO: 206, SEQ ID NO: 207, SEQ ID NO: 208, SEQ ID NO: 209, SEQ ID NO: 210, SEQ ID NO: 211, SEQ ID NO: 212, SEQ ID NO: 213, SEQ ID NO: 214, SEQ ID NO: 215, SEQ ID NO: 216, SEQ ID NO: 217, SEQ ID NO: 218, SEQ ID NO: 219, SEQ ID NO: 220, SEQ ID NO: 221, or SEQ ID NO: 222.

[0373] In some examples of any of the ABPCs described herein, the first antigen-binding domain includes a heavy chain variable domain comprising SEQ ID NO: 259, and a light chain variable domain comprising SEQ ID NO: 144, SEQ ID NO: 191, SEQ ID NO: 192, SEQ ID NO: 193, SEQ ID NO: 194, SEQ ID NO: 195, SEQ ID NO: 196, SEQ ID NO: 197, SEQ ID NO: 198, SEQ ID NO: 199, SEQ ID NO: 200, SEQ ID NO: 201, SEQ ID NO: 202, SEQ ID NO: 203, SEQ ID NO: 204, SEQ ID NO: 205, SEQ ID NO: 206, SEQ ID NO: 207, SEQ ID NO: 208, SEQ ID NO: 209, SEQ ID NO: 210, SEQ ID NO: 211, SEQ ID NO: 212, SEQ ID NO: 213, SEQ ID NO: 214, SEQ ID NO: 215, SEQ ID NO: 216, SEQ ID NO: 217, SEQ ID NO: 218, SEQ ID NO: 219, SEQ ID NO: 220, SEQ ID NO: 221, or SEQ ID NO: 222.

[0374] In some examples of any of the ABPCs described herein, the first antigen-binding domain includes a heavy chain variable domain comprising SEQ ID NO: 260, and a light chain variable domain comprising SEQ ID NO: 144, SEQ ID NO: 191, SEQ ID NO: 192, SEQ ID NO: 193, SEQ ID NO: 194, SEQ ID NO: 195, SEQ ID NO: 196, SEQ ID NO: 197, SEQ ID NO: 198, SEQ ID NO: 199, SEQ ID NO: 200, SEQ ID NO: 201, SEQ ID NO: 202, SEQ ID NO: 203, SEQ ID NO: 204, SEQ ID NO: 205, SEQ ID NO: 206, SEQ ID NO: 207, SEQ ID NO: 208, SEQ ID NO: 209, SEQ ID NO: 210, SEQ ID NO: 211, SEQ ID NO: 212, SEQ ID NO: 213, SEQ ID NO: 214, SEQ ID NO: 215, SEQ ID NO: 216, SEQ ID NO: 217, SEQ ID NO: 218, SEQ ID NO: 219, SEQ ID NO: 220, SEQ ID NO: 221, or SEQ ID NO: 222.

[0375] In some examples of any of the ABPCs described herein, the first antigen-binding domain includes a heavy chain variable domain comprising SEQ ID NO: 261, and a light chain variable domain comprising SEQ ID NO: 144, SEQ ID NO: 191, SEQ ID NO: 192, SEQ ID NO: 193, SEQ ID NO: 194, SEQ ID NO: 195, SEQ ID NO: 196, SEQ ID NO: 197, SEQ ID NO: 198, SEQ ID NO: 199, SEQ ID NO: 200, SEQ ID NO: 201, SEQ ID NO: 202, SEQ ID NO: 203, SEQ ID NO: 204, SEQ ID NO: 205, SEQ ID NO: 206, SEQ ID NO: 207, SEQ ID NO: 208, SEQ ID NO: 209, SEQ ID NO: 210, SEQ ID NO: 211, SEQ ID NO: 212, SEQ ID NO: 213, SEQ ID NO: 214, SEQ ID NO: 215, SEQ ID NO: 216, SEQ ID NO: 217, SEQ ID NO: 218, SEQ ID NO: 219, SEQ ID NO: 220, SEQ ID NO: 221, or SEQ ID NO: 222.

[0376] In some examples of any of the ABPCs described herein, the first antigen-binding domain includes a heavy chain variable domain comprising SEQ ID NO: 262, and a light chain variable domain comprising SEQ ID NO: 144, SEQ ID NO: 191, SEQ ID NO: 192, SEQ ID NO: 193, SEQ ID NO: 194, SEQ ID NO: 195, SEQ ID NO: 196, SEQ ID NO: 197, SEQ ID NO: 198, SEQ ID NO: 199, SEQ ID NO: 200, SEQ ID NO: 201, SEQ ID NO: 202, SEQ ID NO: 203, SEQ ID NO: 204, SEQ ID NO: 205, SEQ ID NO: 206, SEQ ID NO: 207, SEQ ID NO: 208, SEQ ID NO: 209, SEQ ID NO: 210, SEQ ID NO: 211, SEQ ID NO: 212, SEQ ID NO: 213, SEQ ID NO: 214, SEQ ID NO: 215, SEQ ID NO: 216, SEQ ID NO: 217, SEQ ID NO: 218, SEQ ID NO: 219, SEQ ID NO: 220, SEQ ID NO: 221, or SEQ ID NO: 222.

[0377] In some examples of any of the ABPCs described herein, the first antigen-binding domain includes a heavy chain variable domain comprising SEQ ID NO: 263, and a light chain variable domain comprising SEQ ID NO: 144, SEQ ID NO: 191, SEQ ID NO: 192, SEQ ID NO: 193, SEQ ID NO: 194, SEQ ID NO: 195, SEQ ID NO: 196, SEQ ID NO: 197, SEQ ID NO: 198, SEQ ID NO: 199, SEQ ID NO: 200, SEQ ID NO: 201, SEQ ID NO: 202, SEQ ID NO: 203, SEQ ID NO: 204, SEQ ID NO: 205, SEQ ID NO: 206, SEQ ID NO: 207, SEQ ID NO: 208, SEQ ID NO: 209, SEQ ID NO: 210, SEQ ID NO: 211, SEQ ID NO: 212, SEQ ID NO: 213, SEQ ID NO: 214, SEQ ID NO: 215, SEQ ID NO: 216, SEQ ID NO: 217, SEQ ID NO: 218, SEQ ID NO: 219, SEQ ID NO: 220, SEQ ID NO: 221, or SEQ ID NO: 222.

[0378] In some examples of any of the ABPCs described herein, the first antigen-binding domain includes a heavy chain variable domain comprising SEQ ID NO: 264, and a light chain variable domain comprising SEQ ID NO: 144, SEQ ID NO: 191, SEQ ID NO: 192, SEQ ID NO: 193, SEQ ID NO: 194, SEQ ID NO: 195, SEQ ID NO: 196, SEQ ID NO: 197, SEQ ID NO: 198, SEQ ID NO: 199, SEQ ID NO: 200, SEQ ID NO: 201, SEQ ID NO: 202, SEQ ID NO: 203, SEQ ID NO: 204, SEQ ID NO: 205, SEQ ID NO: 206, SEQ ID NO: 207, SEQ ID NO: 208, SEQ ID NO: 209, SEQ ID NO: 210, SEQ ID NO: 211, SEQ ID NO: 212, SEQ ID NO: 213, SEQ ID NO: 214, SEQ ID NO: 215, SEQ ID NO: 216, SEQ ID NO: 217, SEQ ID NO: 218, SEQ ID NO: 219, SEQ ID NO: 220, SEQ ID NO: 221, or SEQ ID NO: 222.

[0379] In some examples of any of the ABPCs described herein, the first antigen-binding domain includes a heavy chain variable domain comprising SEQ ID NO: 265, and a light chain variable domain comprising SEQ ID NO: 144, SEQ ID NO: 191, SEQ ID NO: 192, SEQ ID NO: 193, SEQ ID NO: 194, SEQ ID NO: 195, SEQ ID NO: 196, SEQ ID NO: 197, SEQ ID NO: 198, SEQ ID NO: 199, SEQ ID NO: 200, SEQ ID NO: 201, SEQ ID NO: 202, SEQ ID NO: 203, SEQ ID NO: 204, SEQ ID NO: 205, SEQ ID NO: 206, SEQ ID NO: 207, SEQ ID NO: 208, SEQ ID NO: 209, SEQ ID NO: 210, SEQ ID NO: 211, SEQ ID NO: 212, SEQ ID NO: 213, SEQ ID NO: 214, SEQ ID NO: 215, SEQ ID NO: 216, SEQ ID NO: 217, SEQ ID NO: 218, SEQ ID NO: 219, SEQ ID NO: 220, SEQ ID NO: 221, or SEQ ID NO: 222.

[0380] In some examples of any of the ABPCs described herein, the first antigen-binding domain includes a heavy chain variable domain comprising SEQ ID NO: 266, and a light chain variable domain comprising SEQ ID NO: 144, SEQ ID NO: 191, SEQ ID NO: 192, SEQ ID NO: 193, SEQ ID NO: 194, SEQ ID NO: 195, SEQ ID NO: 196, SEQ ID NO: 197, SEQ ID NO: 198, SEQ ID NO: 199, SEQ ID NO: 200, SEQ ID NO: 201, SEQ ID NO: 202, SEQ ID NO: 203, SEQ ID NO: 204, SEQ ID NO: 205, SEQ ID NO: 206, SEQ ID NO: 207, SEQ ID NO: 208, SEQ ID NO: 209, SEQ ID NO: 210, SEQ ID NO: 211, SEQ ID NO: 212, SEQ ID NO: 213, SEQ ID NO: 214, SEQ ID NO: 215, SEQ ID NO: 216, SEQ ID NO: 217, SEQ ID NO: 218, SEQ ID NO: 219, SEQ ID NO: 220, SEQ ID NO: 221, or SEQ ID NO: 222.

[0381] In some examples of any of the ABPCs described herein, the first antigen-binding domain includes a heavy chain variable domain comprising SEQ ID NO: 267, and a light chain variable domain comprising SEQ ID NO: 144, SEQ ID NO: 191, SEQ ID NO: 192, SEQ ID NO: 193, SEQ ID NO: 194, SEQ ID NO: 195, SEQ ID NO: 196, SEQ ID NO: 197, SEQ ID NO: 198, SEQ ID NO: 199, SEQ ID NO: 200, SEQ ID NO: 201, SEQ ID NO: 202, SEQ ID NO: 203, SEQ ID NO: 204, SEQ ID NO: 205, SEQ ID NO: 206, SEQ ID NO: 207, SEQ ID NO: 208, SEQ ID NO: 209, SEQ ID NO: 210, SEQ ID NO: 211, SEQ ID NO: 212, SEQ ID NO: 213, SEQ ID NO: 214, SEQ ID NO: 215, SEQ ID NO: 216, SEQ ID NO: 217, SEQ ID NO: 218, SEQ ID NO: 219, SEQ ID NO: 220, SEQ ID NO: 221, or SEQ ID NO: 222.

[0382] In some examples of any of the ABPCs described herein, the first antigen-binding domain includes a heavy chain variable domain of TRPH-222 with one or more (e.g., one, two, three, four, five, six, seven, eight, nine, ten, eleven, twelve, thirteen, fourteen, fifteen, sixteen, seventeen, eighteen, nineteen, or twenty) amino acids substituted with a histidine. In some examples of any of the ABPCs described herein, the first antigen-binding domain includes a light chain variable domain of TRPH-222 with one or more (e.g., one, two, three, four, five, six, seven, eight, nine, ten, eleven, twelve, thirteen, fourteen, fifteen, sixteen, seventeen, eighteen, nineteen, or twenty) amino acids substituted with a histidine. In some examples of any of the ABPCs described herein, the first antigen-binding domain includes a heavy chain variable domain of TRPH-222 with one or more (e.g., one, two, three, four, five, six, seven, eight, nine, ten, eleven, twelve, thirteen, fourteen, fifteen, sixteen, seventeen, eighteen, nineteen, or twenty) amino acids substituted with a histidine; and a light chain variable domain of TRPH-222 with one or more (e.g., one, two, three, four, five, six, seven, eight, nine, ten, eleven, twelve, thirteen, fourteen, fifteen, sixteen, seventeen, eighteen, nineteen, or twenty) amino acids substituted with a histidine. In some examples of any of the ABPCs described herein, the heavy chain variable domain of TRPH-222 comprises SEQ ID NO: 268. In some examples of any of the ABPCs described herein, the light chain variable domain of TRPH-222 comprises SEQ ID NO: 269.

[0383] In some examples of any of the ABPCs described herein, the first antigen-binding domain comprises a heavy chain variable domain comprising a CDR1, a CDR2, and a CDR3 of SEQ ID NO: 270, SEQ ID NO: 271, and SEQ ID NO: 272, respectively, with collectively a total of one or more (e.g., one, two, three, four, five, six, seven, eight, nine, or ten) amino acid positions in SEQ ID NOs: 270-272 substituted with a histidine. In some examples of any of the ABPCs described herein, the first antigen-binding domain comprises a light chain variable domain comprising a CDR1, a CDR2, and a CDR3 of SEQ ID NO: 273, SEQ ID NO: 274, and SEQ ID NO: 275, respectively, with collectively a total of one or more (e.g., one, two, three, four, five, six, seven, eight, nine, or ten) amino acid positions in SEQ ID NOs: 273-275 substituted with a histidine. In some examples of any of the ABPCs described herein, the first antigen-binding domain includes: a heavy chain variable domain comprising a CDR1, a CDR2, and a CDR3 of SEQ ID NO: 270, SEQ ID NO: 271, and SEQ ID NO: 272, respectively, with collectively a total of one or more (e.g., one, two, three, four, five, six, seven, eight, nine, or ten) amino acid positions in SEQ ID NOs: 270-272 substituted with a histidine; and a light chain variable domain comprising a CDR1, a CDR2, and a CDR3 of SEQ ID NO: 273, SEQ ID NO: 274, and SEQ ID NO: 275, respectively, with collectively a total of one or more (e.g., one, two, three, four, five, six, seven, eight, nine, or ten) amino acid positions in SEQ ID NOs: 273-275 substituted with a histidine.

[0384] In some examples of any of the ABPCs described herein, the first antigen-binding domain includes a heavy chain variable domain that is at least 90% (e.g., at least 92%, at least 94%, at least 96%, at least 98%, at least 99%, or 100%) identical to SEQ ID NO: 268, where the heavy chain variable domain includes a histidine at one or more (e.g., one, two, three, four, five, six, seven, eight, nine, ten, eleven, twelve, thirteen, fourteen, fifteen, sixteen, seventeen, eighteen, nineteen, or twenty) amino acid positions in SEQ ID NO: 268 selected from the group consisting of: 32, 33, 54, 55, 97, 98, 100, 102, 106, 107, and 111. In some examples of any of the ABPCs described herein, the first antigen-binding domain includes a light chain variable domain that is at least 90% (e.g., at least 92%, at least 94%, at least 96%, at least 98%, at least 99%, or 100%) identical to SEQ ID NO: 269, where the light chain variable domain includes a histidine at one or more (e.g., one, two, three, four, five, six, seven, eight, nine, ten, eleven, twelve, thirteen, fourteen, fifteen, sixteen, seventeen, eighteen, nineteen, or twenty) amino acid positions in SEQ ID NO: 269 selected from the group consisting of: 53 and 91. In some examples of any of the ABPCs described herein the first antigen-binding domain includes: a heavy chain variable domain that is at least 90% (e.g., at least 92%, at least 94%, at least 96%, at least 98%, at least 99%, or 100%) identical to SEQ ID NO: 268, where the heavy chain variable domain includes a histidine at one or more (e.g., one, two, three, four, five, six, seven, eight, nine, ten, eleven, twelve, thirteen, fourteen, fifteen, sixteen, seventeen, eighteen, nineteen, or twenty) amino acid positions in SEQ ID NO: 268 selected from the group consisting of: 32, 33, 54, 55, 97, 98, 100, 102, 106, 107, and 111, and a light chain variable domain that is at least 90% (e.g., at least 92%, at least 94%, at least 96%, at least 98%, at least 99%, or 100%) identical to SEQ ID NO: 269, where the light chain variable domain includes a histidine at one or more (e.g., one, two, three, four, five, six, seven, eight, nine, ten, eleven, twelve, thirteen, fourteen, fifteen, sixteen, seventeen, eighteen, nineteen, or twenty) amino acid positions in SEQ ID NO: 269 selected from the group consisting of: 53 and 91.

[0385] In some examples of any of the ABPCs described herein, the first antigen-binding domain includes a heavy chain variable domain that is at least 90% (e.g., at least 92%, at least 94%, at least 96%, at least 98%, at least 99%, or 100%) identical to SEQ ID NO: 268, where the heavy chain variable domain includes an alanine at position 99 in SEQ ID NO: 268.

[0386] In some examples of any of the ABPCs described herein the first antigen-binding domain includes: a heavy chain variable domain that is at least 90% (e.g., at least 92%, at least 94%, at least 96%, at least 98%, at least 99%, or 100%) identical to SEQ ID NO: 268, where the heavy chain variable domain includes an alanine at position 99 in SEQ ID NO: 268, and a light chain variable domain that is at least 90% (e.g., at least 92%, at least 94%, at least 96%, at least 98%, at least 99%, or 100%) identical to SEQ ID NO: 269, where the light chain variable domain includes a histidine at one or more (e.g., one, two, three, four, five, six, seven, eight, nine, ten, eleven, twelve, thirteen, fourteen, fifteen, sixteen, seventeen, eighteen, nineteen, or twenty) amino acid positions in SEQ ID NO: 269 selected from the group consisting of: 53 and 91.

[0387] In some examples of any of the ABPCs described herein, the first antigen-binding domain includes a heavy chain variable domain that is at least 90% (e.g., at least 92%, at least 94%, at least 96%, at least 98%, at least 99%, or 100%) identical to SEQ ID NO: 268, where the heavy chain variable domain includes a histidine at one or more (e.g., one, two, three, four, five, six, seven, eight, nine, ten, eleven, twelve, thirteen, fourteen, fifteen, sixteen, seventeen, eighteen, nineteen, or twenty) amino acid positions in SEQ ID NO: 268 selected from the group consisting of: 32, 33, 54, 55, 97, 98, 100, 102, 106, 107, and 111, and where the heavy chain variable domain includes an alanine at position 99 in SEQ ID NO: 268. In some examples of any of the ABPCs described herein the first antigen-binding domain includes: a heavy chain variable domain that is at least 90% (e.g., at least 92%, at least 94%, at least 96%, at least 98%, at least 99%, or 100%) identical to SEQ ID NO: 268, where the heavy chain variable domain includes a histidine at one or more (e.g., one, two, three, four, five, six, seven, eight, nine, ten, eleven, twelve, thirteen, fourteen, fifteen, sixteen, seventeen, eighteen, nineteen, or twenty) amino acid positions in SEQ ID NO: 1 selected from the group consisting of: 32, 33, 54, 55, 97, 98, 100, 102, 106, 107, and 111, and where the heavy chain variable domain includes an alanine at position 99 in SEQ ID NO: 1, and a light chain variable domain that is at least 90% (e.g., at least 92%, at least 94%, at least 96%, at least 98%, at least 99%, or 100%) identical to SEQ ID NO: 269, where the light chain variable domain includes a histidine at one or more (e.g., one, two, three, four, five, six, seven, eight, nine, ten, eleven, twelve, thirteen, fourteen, fifteen, sixteen, seventeen, eighteen, nineteen, or twenty) amino acid positions in SEQ ID NO: 269 selected from the group consisting of: 53 and 91.

[0388] In some examples of any of the ABPCs described herein, a heavy chain variable domain includes a heavy chain variable domain that is at least 90% (e.g., at least 92%, at least 94%, at least 96%, at least 98%, at least 99%, or 100%) identical to SEQ ID NO: 268, where the heavy chain variable domain includes a histidine at any of the specific combinations of one or more amino acid positions in SEQ ID NO: 268 listed in Table 5.

TABLE 5
Exemplary Combinations of Amino Acid Positions in SEQ
ID NO: 268 that can be Substituted with Histidine

32 + 33, 32 + 54, 32 + 55, 32 + 97, 32 + 98, 32 + 100, 32 + 102, 32 + 106, 32 + 107, 32 +
111, 33 + 54, 33 + 55, 33 + 97, 33 + 98, 33 + 100, 33 + 102, 33 + 106, 33 + 107, 33 + 111,
54 + 55, 54 + 97, 54 + 98, 54 + 100, 54 + 102, 54 + 106, 54 + 107, 54 + 111, 55 + 97, 55 +
98, 55 + 100, 55 + 102, 55 + 106, 55 + 107, 55 + 111, 97 + 98, 97 + 100, 97 + 102, 97 +
106, 97 + 107, 97 + 111, 98 + 100, 98 + 102, 98 + 106, 98 + 107, 98 + 111, 100 + 102, 100 +
106, 100 + 107, 100 + 111, 102 + 106, 102 + 107, 102 + 111, 106 + 107, 106 + 111, 107 +
111, 32 + 33 + 54, 32 + 33 + 55, 32 + 33 + 97, 32 + 33 + 98, 32 + 33 + 100, 32 + 33 +
102, 32 + 33 + 106, 32 + 33 + 107, 32 + 33 + 111, 32 + 54 + 55, 32 + 54 + 97, 32 + 54 +
98, 32 + 54 + 100, 32 + 54 + 102, 32 + 54 + 106, 32 + 54 + 107, 32 + 54 + 111, 32 + 55 +
97, 32 + 55 + 98, 32 + 55 + 100, 32 + 55 + 102, 32 + 55 + 106, 32 + 55 + 107, 32 + 55 +
111, 32 + 97 + 98, 32 + 97 + 100, 32 + 97 + 102, 32 + 97 + 106, 32 + 97 + 107, 32 + 97 +
111, 32 + 98 + 100, 32 + 98 + 102, 32 + 98 + 106, 32 + 98 + 107, 32 + 98 + 111, 32 + 100 +
102, 32 + 100 + 106, 32 + 100 + 107, 32 + 100 + 111, 32 + 102 + 106, 32 + 102 + 107,
32 + 102 + 111, 32 + 106 + 107, 32 + 106 + 111, 32 + 107 + 111, 33 + 54 + 55, 33 + 54 +
97, 33 + 54 + 98, 33 + 54 + 100, 33 + 54 + 102, 33 + 54 + 106, 33 + 54 + 107, 33 + 54 +
111, 33 + 55 + 97, 33 + 55 + 98, 33 + 55 + 100, 33 + 55 + 102, 33 + 55 + 106, 33 + 55 +
107, 33 + 55 + 111, 33 + 97 + 98, 33 + 97 + 100, 33 + 97 + 102, 33 + 97 + 106, 33 + 97 +
107, 33 + 97 + 111, 33 + 98 + 100, 33 + 98 + 102, 33 + 98 + 106, 33 + 98 + 107, 33 + 98 +
111, 33 + 100 + 102, 33 + 100 + 106, 33 + 100 + 107, 33 + 100 + 111, 33 + 102 + 106, 33 +
102 + 107, 33 + 102 + 111, 33 + 106 + 107, 33 + 106 + 111, 33 + 107 + 111, 54 + 55 +
97, 54 + 55 + 98, 54 + 55 + 100, 54 + 55 + 102, 54 + 55 + 106, 54 + 55 + 107, 54 + 55 +
111, 54 + 97 + 98, 54 + 97 + 100, 54 + 97 + 102, 54 + 97 + 106, 54 + 97 + 107, 54 + 97 +
111, 54 + 98 + 100, 54 + 98 + 102, 54 + 98 + 106, 54 + 98 + 107, 54 + 98 + 111, 54 + 100 +
102, 54 + 100 + 106, 54 + 100 + 107, 54 + 100 + 111, 54 + 102 + 106, 54 + 102 + 107,
54 + 102 + 111, 54 + 106 + 107, 54 + 106 + 111, 54 + 107 + 111, 55 + 97 + 98, 55 + 97 +
100, 55 + 97 + 102, 55 + 97 + 106, 55 + 97 + 107, 55 + 97 + 111, 55 + 98 + 100, 55 + 98 +
102, 55 + 98 + 106, 55 + 98 + 107, 55 + 98 + 111, 55 + 100 + 102, 55 + 100 + 106, 55 +
100 + 107, 55 + 100 + 111, 55 + 102 + 106, 55 + 102 + 107, 55 + 102 + 111, 55 + 106 +
107, 55 + 106 + 111, 55 + 107 + 111, 97 + 98 + 100, 97 + 98 + 102, 97 + 98 + 106, 97 +
98 + 107, 97 + 98 + 111, 97 + 100 + 102, 97 + 100 + 106, 97 + 100 + 107, 97 + 100 + 111,
97 + 102 + 106, 97 + 102 + 107, 97 + 102 + 111, 97 + 106 + 107, 97 + 106 + 111, 97 +
107 + 111, 98 + 100 + 102, 98 + 100 + 106, 98 + 100 + 107, 98 + 100 + 111, 98 + 102 +
106, 98 + 102 + 107, 98 + 102 + 111, 98 + 106 + 107, 98 + 106 + 111, 98 + 107 + 111, 100 +
102 + 106, 100 + 102 + 107, 100 + 102 + 111, 100 + 106 + 107, 100 + 106 + 111, 100 +
107 + 111, 102 + 106 + 107, 102 + 106 + 111, 102 + 107 + 111, 106 + 107 + 111

[0389] In some examples of any of the ABPCs described herein, a light chain variable domain includes a light chain variable domain that is at least 90% (e.g., at least 92%, at least 94%, at least 96%, at least 98%, at least 99%, or 100%) identical to SEQ ID NO: 269, where the light chain variable domain includes a histidine at any of the specific combinations of one or more amino acid positions in SEQ ID NO: 269 listed in Table 6.

[0390] In some examples of any of the ABPCs described herein, the first antigen-binding domain includes a light chain variable domain that is at least 90% (e.g., at least 92%, at least 94%, at least 96%, at least 98%, at least 99%, or 100%) identical to SEQ ID NO: 269, where the light chain variable domain includes an alanine at position 55 in SEQ ID NO: 269.

[0391] In some examples of any of the ABPCs described herein the first antigen-binding domain includes: a light chain variable domain that is at least 90% (e.g., at least 92%, at least 94%, at least 96%, at least 98%, at least 99%, or 100%) identical to SEQ ID NO: 269, where the light chain variable domain includes an alanine at position 55 in SEQ ID NO: 269, and a heavy chain variable domain that is at least 90% (e.g., at least 92%, at least 94%, at least 96%, at least 98%, at least 99%, or 100%) identical to SEQ ID NO: 268, where the heavy chain variable domain includes a histidine at one or more (e.g., one, two, three, four, five, six, seven, eight, nine, ten, eleven, twelve, thirteen, fourteen, fifteen, sixteen, seventeen, eighteen, nineteen, or twenty) amino acid positions in SEQ ID NO: 268 selected from the group consisting of: 32, 33, 54, 55, 97, 98, 100, 102, 106, 107, and 111.

[0392] In some examples of any of the ABPCs described herein, the first antigen-binding domain includes a light chain variable domain that is at least 90% (e.g., at least 92%, at least 94%, at least 96%, at least 98%, at least 99%, or 100%) identical to SEQ ID NO: 269, where the light chain variable domain includes a histidine at one or more (e.g., one, two, three, four, five, six, seven, eight, nine, ten, eleven, twelve, thirteen, fourteen, fifteen, sixteen, seventeen, eighteen, nineteen, or twenty) amino acid positions in SEQ ID NO: 269 selected from the group consisting of: 53 and 91 and where the light chain variable domain includes an alanine at position 55 in SEQ ID NO: 269. In some examples of any of the ABPCs described herein the first antigen-binding domain includes: a light chain variable domain that is at least 90% (e.g., at least 92%, at least 94%, at least 96%, at least 98%, at least 99%, or 100%) identical to SEQ ID NO: 269, where the light chain variable domain includes a histidine at one or more (e.g., one, two, three, four, five, six, seven, eight, nine, ten, eleven, twelve, thirteen, fourteen, fifteen, sixteen, seventeen, eighteen, nineteen, or twenty) amino acid positions in SEQ ID NO: 269 selected from the group consisting of: 53 and 91 and where the light chain variable domain includes an alanine at position 55 in SEQ ID NO: 269, and a heavy chain variable domain that is at least 90% (e.g., at least 92%, at least 94%, at least 96%, at least 98%, at least 99%, or 100%) identical to SEQ ID NO: 268, where the heavy chain variable domain includes a histidine at one or more (e.g., one, two, three, four, five, six, seven, eight, nine, ten, eleven, twelve, thirteen, fourteen, fifteen, sixteen, seventeen, eighteen, nineteen, or twenty) amino acid positions in SEQ ID NO: 268 selected from the group consisting of: 32, 33, 54, 55, 97, 98, 100, 102, 106, 107, and 111.

[0393] In some examples of any of the ABPCs described herein, a light chain variable domain includes a light chain variable domain that is at least 90% (e.g., at least 92%, at least 94%, at least 96%, at least 98%, at least 99%, or 100%) identical to SEQ ID NO: 269, where the light chain variable domain includes a histidine at any of the specific combinations of one or more amino acid positions in SEQ ID NO: 269 listed in Table 6 and where the light chain variable domain includes an alanine at position 55 of SEQ ID NO: 269.

TABLE 6
Exemplary Combinations of Amino Acid Positions in SEQ
ID NO: 269 that can be Substituted with Histidine

53 + 91

[0394] In some examples of any of the ABPCs described herein, the first antigen-binding domain includes a heavy chain variable domain that is at least 90% (e.g., at least 92%, at least 94%, at least 96%, at least 98%, at least 99%, or 100%) identical to SEQ ID NO: 268, where the heavy chain variable domain includes a histidine at any of the specific combinations of one or more amino acid positions in SEQ ID NO: 268 listed in Table 5; and a light chain variable domain that that is at least 90% (e.g., at least 92%, at least 94%, at least 96%, at least 98%, at least 99%, or 100%) identical to SEQ ID NO: 269, where the light chain variable domain includes a histidine at any of the specific combinations of one or more amino acid positions in SEQ ID NO: 269 listed in Table 6.

[0395] In some examples of any of the ABPCs described herein, the first antigen-binding domain comprises a light chain variable domain comprising SEQ ID NO: 269, and a heavy chain variable domain that is at least 90% identical (e.g., at least 92%, at least 94%, at least 96%, at least 98%, at least 99%, or 100%) identical to SEQ ID NO: 268, where the heavy chain variable domain includes a histidine at any of the specific combinations of one or more (e.g., two, three, four, five, six, seven, eight, nine, or ten) amino acid positions in SEQ ID NO: 268 listed in Table 5.

[0396] In some examples of any of the ABPCs described herein, the first antigen-binding domain comprises a light chain variable domain that is at least 90% identical to SEQ ID NO: 269, wherein the light chain variable domain includes a histidine at position 53 in SEQ ID NO: 53; and a heavy chain variable domain that is at least 90% (e.g., at least 92%, at least 94%, at least 96%, at least 98%, at least 99%, or 100%) identical to SEQ ID NO: 268, where the heavy chain variable domain includes a histidine at any of the specific combinations of one or more amino acid positions in SEQ ID NO: 268 listed in Table 5.

[0397] In some examples of any of the ABPCs described herein, the first antigen-binding domain comprises a light chain variable domain that is at least 90% identical to SEQ ID NO: 269, wherein the light chain variable domain includes a histidine at position 91 in SEQ ID NO: 53; and a heavy chain variable domain that is at least 90% (e.g., at least 92%, at least 94%, at least 96%, at least 98%, at least 99%, or 100%) identical to SEQ ID NO: 268, where the heavy chain variable domain includes a histidine at any of the specific combinations of one or more amino acid positions in SEQ ID NO: 268 listed in Table 5.

[0398] In some examples of any of the ABPCs described herein, the first antigen-binding domain comprises a light chain variable domain that is at least 90% identical to SEQ ID NO: 269, wherein the light chain variable domain includes an alanine at position 55 in SEQ ID NO: 269; and a heavy chain variable domain that is at least 90% (e.g., at least 92%, at least 94%, at least 96%, at least 98%, at least 99%, or 100%) identical to SEQ ID NO: 268, where the heavy chain variable domain includes a histidine at any of the specific combinations of one or more amino acid positions in SEQ ID NO: 268 listed in Table 5.

[0399] In some examples of any of the ABPCs described herein, the first antigen-binding domain includes a heavy chain variable domain that is at least 90% (e.g., at least 92%, at least 94%, at least 96%, at least 98%, at least 99%, or 100%) identical to SEQ ID NO: 268, where the heavy chain variable domain includes a histidine at any of the specific combinations of one or more amino acid positions in SEQ ID NO: 268 listed in Table 5, and where the heavy chain variable domain includes an alanine at position 99 in SEQ ID NO: 268; and a light chain variable domain that that is at least 90% (e.g., at least 92%, at least 94%, at least 96%, at least 98%, at least 99%, or 100%) identical to SEQ ID NO: 269, where the light chain variable domain includes a histidine at any of the specific combinations of one or more amino acid positions in SEQ ID NO: 269 listed in Table 6, or where the light chain variable domain includes an alanine at position 55 in SEQ ID NO: 269.

[0400] In some examples of any of the ABPCs described herein, the first antigen-binding domain includes a heavy chain variable domain of TRPH-222 with one or more (e.g., one, two, three, four, five, six, seven, eight, nine, ten, eleven, twelve, thirteen, fourteen, fifteen, sixteen, seventeen, eighteen, nineteen, or twenty) histidine(s) substituted with an alanine. In some examples of any of the ABPCs described herein, the first antigen-binding domain includes a light chain variable domain of TRPH-222 with one or more (e.g., one, two, three, four, five, six, seven, eight, nine, ten, eleven, twelve, thirteen, fourteen, fifteen, sixteen, seventeen, eighteen, nineteen, or twenty) histidine(s) substituted with an alanine. In some examples of any of the ABPCs described herein, the first antigen-binding domain includes a heavy chain variable domain of TRPH-222 with one or more (e.g., one, two, three, four, five, six, seven, eight, nine, ten, eleven, twelve, thirteen, fourteen, fifteen, sixteen, seventeen, eighteen, nineteen, or twenty) histidines substituted with an alanine; and a light chain variable domain of TRPH-222 with one or more (e.g., one, two, three, four, five, six, seven, eight, nine, ten, eleven, twelve, thirteen, fourteen, fifteen, sixteen, seventeen, eighteen, nineteen, or twenty) histidine(s) substituted with an alanine. In some examples of any of the ABPCs described herein, the heavy chain variable domain of TRPH-222 comprises SEQ ID NO: 268. In some examples of any of the ABPCs described herein, the light chain variable domain of TRPH-222 comprises SEQ ID NO: 269.

[0401] In some examples of any of the ABPCs described herein, the first antigen-binding domain comprises a heavy chain variable domain comprising a CDR1, a CDR2, and a CDR3 of SEQ ID NO: 270, SEQ ID NO: 271, and SEQ ID NO: 272, respectively, with collectively a total of one or more (e.g., one, two, three, four, five, six, seven, eight, nine, or ten) histidine(s) in SEQ ID NOs: 270-272 substituted with an alanine. In some examples of any of the ABPCs described herein, the first antigen-binding domain comprises a light chain variable domain comprising a CDR1, a CDR2, and a CDR3 of SEQ ID NO: 273, SEQ ID NO: 274, and SEQ ID NO: 275, respectively, with collectively a total of one or more (e.g., one, two, three, four, five, six, seven, eight, nine, or ten) histidine(s) in SEQ ID NOs: 273-275 substituted with an alanine. In some examples of any of the ABPCs described herein, the first antigen-binding domain includes: a heavy chain variable domain comprising a CDR1, a CDR2, and a CDR3 of SEQ ID NO: 270, SEQ ID NO: 271, and SEQ ID NO: 272, respectively, with collectively a total of one or more (e.g., one, two, three, four, five, six, seven, eight, nine, or ten) histidine(s) in SEQ ID NOs: 270-272 substituted with an alanine; and a light chain variable domain comprising a CDR1, a CDR2, and a CDR3 of SEQ ID NO: 273, SEQ ID NO: 274, and SEQ ID NO: 275, respectively, with collectively a total of one or more (e.g., one, two, three, four, five, six, seven, eight, nine, or ten) histidine(s) in SEQ ID NOs: 273-275 substituted with an alanine.

[0402] In some examples of any of the ABPCs described herein, the first antigen-binding domain comprises a heavy chain variable domain of SEQ ID NO: 268, SEQ ID NO: 276, SEQ ID NO: 277, SEQ ID NO: 278, SEQ ID NO: 279, SEQ ID NO: 280, SEQ ID NO: 281, SEQ ID NO: 282, SEQ ID NO: 283, SEQ ID NO: 284, SEQ ID NO: 285, SEQ ID NO: 286, SEQ ID NO: 287, SEQ ID NO: 288, SEQ ID NO: 289, SEQ ID NO: 290, SEQ ID NO: 291, SEQ ID NO: 292, SEQ ID NO: 293, SEQ ID NO: 294, SEQ ID NO: 295, SEQ ID NO: 296, SEQ ID NO: 297, SEQ ID NO: 298, SEQ ID NO: 299, SEQ ID NO: 300, SEQ ID NO: 301, SEQ ID NO: 302, SEQ ID NO: 303, SEQ ID NO: 304, SEQ ID NO: 305, SEQ ID NO: 306, SEQ ID NO: 307, SEQ ID NO: 308, SEQ ID NO: 309, SEQ ID NO: 310, SEQ ID NO: 311, SEQ ID NO: 312, SEQ ID NO: 313, SEQ ID NO: 314, SEQ ID NO: 315, SEQ ID NO: 316, SEQ ID NO: 317, or SEQ ID NO: 318.

[0403] In some examples of any of the ABPCs described herein, the first antigen-binding domain includes a light chain variable domain of SEQ ID NO: 269, SEQ ID NO: 319, SEQ ID NO: 320, SEQ ID NO: 321, SEQ ID NO: 322, SEQ ID NO: 323, SEQ ID NO: 324, SEQ ID NO: 325, SEQ ID NO: 326, SEQ ID NO: 327, SEQ ID NO: 328, SEQ ID NO: 329, SEQ ID NO: 330, SEQ ID NO: 331, SEQ ID NO: 332, SEQ ID NO: 333, SEQ ID NO: 334, SEQ ID NO: 335, SEQ ID NO: 336, SEQ ID NO: 337, SEQ ID NO: 338, SEQ ID NO: 339, SEQ ID NO: 340, SEQ ID NO: 341, SEQ ID NO: 342, SEQ ID NO: 343, SEQ ID NO: 344, or SEQ ID NO: 345.

[0404] In some examples of any of the ABPCs described herein, the first antigen-binding domain includes a light chain variable domain comprising SEQ ID NO: 269, and a heavy chain variable domain comprising: SEQ ID NO: 276, SEQ ID NO: 277, SEQ ID NO: 278, SEQ ID NO: 279, SEQ ID NO: 280, SEQ ID NO: 281, SEQ ID NO: 282, SEQ ID NO: 283, SEQ ID NO: 284, SEQ ID NO: 285, SEQ ID NO: 286, SEQ ID NO: 287, SEQ ID NO: 288, SEQ ID NO: 289, SEQ ID NO: 290, SEQ ID NO: 291, SEQ ID NO: 292, SEQ ID NO: 293, SEQ ID NO: 294, SEQ ID NO: 295, SEQ ID NO: 296, SEQ ID NO: 297, SEQ ID NO: 298, SEQ ID NO: 299, SEQ ID NO: 300, SEQ ID NO: 301, SEQ ID NO: 302, SEQ ID NO: 303, SEQ ID NO: 304, SEQ ID NO: 305, SEQ ID NO: 306, SEQ ID NO: 307, SEQ ID NO: 308, SEQ ID NO: 309, SEQ ID NO: 310, SEQ ID NO: 311, SEQ ID NO: 312, SEQ ID NO: 313, SEQ ID NO: 314, SEQ ID NO: 315, SEQ ID NO: 316, SEQ ID NO: 317, or SEQ ID NO: 318.

[0405] In some examples of any of the ABPCs described herein, the first antigen-binding domain includes a light chain variable domain comprising SEQ ID NO: 319, and a heavy chain variable domain comprising: SEQ ID NO: 268, SEQ ID NO: 276, SEQ ID NO: 277, SEQ ID NO: 278, SEQ ID NO: 279, SEQ ID NO: 280, SEQ ID NO: 281, SEQ ID NO: 282, SEQ ID NO: 283, SEQ ID NO: 284, SEQ ID NO: 285, SEQ ID NO: 286, SEQ ID NO: 287, SEQ ID NO: 288, SEQ ID NO: 289, SEQ ID NO: 290, SEQ ID NO: 291, SEQ ID NO: 292, SEQ ID NO: 293, SEQ ID NO: 294, SEQ ID NO: 295, SEQ ID NO: 296, SEQ ID NO: 297, SEQ ID NO: 298, SEQ ID NO: 299, SEQ ID NO: 300, SEQ ID NO: 301, SEQ ID NO: 302, SEQ ID NO: 303, SEQ ID NO: 304, SEQ ID NO: 305, SEQ ID NO: 306, SEQ ID NO: 307, SEQ ID NO: 308, SEQ ID NO: 309, SEQ ID NO: 310, SEQ ID NO: 311, SEQ ID NO: 312, SEQ ID NO: 313, SEQ ID NO: 314, SEQ ID NO: 315, SEQ ID NO: 316, SEQ ID NO: 317, or SEQ ID NO: 318.

[0406] In some examples of any of the ABPCs described herein, the first antigen-binding domain includes a light chain variable domain comprising SEQ ID NO: 320, and a heavy chain variable domain comprising: SEQ ID NO: 268, SEQ ID NO: 276, SEQ ID NO: 277, SEQ ID NO: 278, SEQ ID NO: 279, SEQ ID NO: 280, SEQ ID NO: 281, SEQ ID NO: 282, SEQ ID NO: 283, SEQ ID NO: 284, SEQ ID NO: 285, SEQ ID NO: 286, SEQ ID NO: 287, SEQ ID NO: 288, SEQ ID NO: 289, SEQ ID NO: 290, SEQ ID NO: 291, SEQ ID NO: 292, SEQ ID NO: 293, SEQ ID NO: 294, SEQ ID NO: 295, SEQ ID NO: 296, SEQ ID NO: 297, SEQ ID NO: 298, SEQ ID NO: 299, SEQ ID NO: 300, SEQ ID NO: 301, SEQ ID NO: 302, SEQ ID NO: 303, SEQ ID NO: 304, SEQ ID NO: 305, SEQ ID NO: 306, SEQ ID NO: 307, SEQ ID NO: 308, SEQ ID NO: 309, SEQ ID NO: 310, SEQ ID NO: 311, SEQ ID NO: 312, SEQ ID NO: 313, SEQ ID NO: 314, SEQ ID NO: 315, SEQ ID NO: 316, SEQ ID NO: 317, or SEQ ID NO: 318.

[0407] In some examples of any of the ABPCs described herein, the first antigen-binding domain includes a light chain variable domain comprising SEQ ID NO: 321, and a heavy chain variable domain comprising: SEQ ID NO: 268, SEQ ID NO: 276, SEQ ID NO: 277, SEQ ID NO: 278, SEQ ID NO: 279, SEQ ID NO: 280, SEQ ID NO: 281, SEQ ID NO: 282, SEQ ID NO: 283, SEQ ID NO: 284, SEQ ID NO: 285, SEQ ID NO: 286, SEQ ID NO: 287, SEQ ID NO: 288, SEQ ID NO: 289, SEQ ID NO: 290, SEQ ID NO: 291, SEQ ID NO: 292, SEQ ID NO: 293, SEQ ID NO: 294, SEQ ID NO: 295, SEQ ID NO: 296, SEQ ID NO: 297, SEQ ID NO: 298, SEQ ID NO: 299, SEQ ID NO: 300, SEQ ID NO: 301, SEQ ID NO: 302, SEQ ID NO: 303, SEQ ID NO: 304, SEQ ID NO: 305, SEQ ID NO: 306, SEQ ID NO: 307, SEQ ID NO: 308, SEQ ID NO: 309, SEQ ID NO: 310, SEQ ID NO: 311, SEQ ID NO: 312, SEQ ID NO: 313, SEQ ID NO: 314, SEQ ID NO: 315, SEQ ID NO: 316, SEQ ID NO: 317, or SEQ ID NO: 318.

[0408] In some examples of any of the ABPCs described herein, the first antigen-binding domain includes a light chain variable domain comprising SEQ ID NO: 322, and a heavy chain variable domain comprising: SEQ ID NO: 268, SEQ ID NO: 276, SEQ ID NO: 277, SEQ ID NO: 278, SEQ ID NO: 279, SEQ ID NO: 280, SEQ ID NO: 281, SEQ ID NO: 282, SEQ ID NO: 283, SEQ ID NO: 284, SEQ ID NO: 285, SEQ ID NO: 286, SEQ ID NO: 287, SEQ ID NO: 288, SEQ ID NO: 289, SEQ ID NO: 290, SEQ ID NO: 291, SEQ ID NO: 292, SEQ ID NO: 293, SEQ ID NO: 294, SEQ ID NO: 295, SEQ ID NO: 296, SEQ ID NO: 297, SEQ ID NO: 298, SEQ ID NO: 299, SEQ ID NO: 300, SEQ ID NO: 301, SEQ ID NO: 302, SEQ ID NO: 303, SEQ ID NO: 304, SEQ ID NO: 305, SEQ ID NO: 306, SEQ ID NO: 307, SEQ ID NO: 308, SEQ ID NO: 309, SEQ ID NO: 310, SEQ ID NO: 311, SEQ ID NO: 312, SEQ ID NO: 313, SEQ ID NO: 314, SEQ ID NO: 315, SEQ ID NO: 316, SEQ ID NO: 317, or SEQ ID NO: 318.

[0409] In some examples of any of the ABPCs described herein, the first antigen-binding domain includes a light chain variable domain comprising SEQ ID NO: 323, and a heavy chain variable domain comprising: SEQ ID NO: 268, SEQ ID NO: 276, SEQ ID NO: 277, SEQ ID NO: 278, SEQ ID NO: 279, SEQ ID NO: 280, SEQ ID NO: 281, SEQ ID NO: 282, SEQ ID NO: 283, SEQ ID NO: 284, SEQ ID NO: 285, SEQ ID NO: 286, SEQ ID NO: 287, SEQ ID NO: 288, SEQ ID NO: 289, SEQ ID NO: 290, SEQ ID NO: 291, SEQ ID NO: 292, SEQ ID NO: 293, SEQ ID NO: 294, SEQ ID NO: 295, SEQ ID NO: 296, SEQ ID NO: 297, SEQ ID NO: 298, SEQ ID NO: 299, SEQ ID NO: 300, SEQ ID NO: 301, SEQ ID NO: 302, SEQ ID NO: 303, SEQ ID NO: 304, SEQ ID NO: 305, SEQ ID NO: 306, SEQ ID NO: 307, SEQ ID NO: 308, SEQ ID NO: 309, SEQ ID NO: 310, SEQ ID NO: 311, SEQ ID NO: 312, SEQ ID NO: 313, SEQ ID NO: 314, SEQ ID NO: 315, SEQ ID NO: 316, SEQ ID NO: 317, or SEQ ID NO: 318.

[0410] In some examples of any of the ABPCs described herein, the first antigen-binding domain includes a light chain variable domain comprising SEQ ID NO: 324, and a heavy chain variable domain comprising: SEQ ID NO: 268, SEQ ID NO: 276, SEQ ID NO: 277, SEQ ID NO: 278, SEQ ID NO: 279, SEQ ID NO: 280, SEQ ID NO: 281, SEQ ID NO: 282, SEQ ID NO: 283, SEQ ID NO: 284, SEQ ID NO: 285, SEQ ID NO: 286, SEQ ID NO: 287, SEQ ID NO: 288, SEQ ID NO: 289, SEQ ID NO: 290, SEQ ID NO: 291, SEQ ID NO: 292, SEQ ID NO: 293, SEQ ID NO: 294, SEQ ID NO: 295, SEQ ID NO: 296, SEQ ID NO: 297, SEQ ID NO: 298, SEQ ID NO: 299, SEQ ID NO: 300, SEQ ID NO: 301, SEQ ID NO: 302, SEQ ID NO: 303, SEQ ID NO: 304, SEQ ID NO: 305, SEQ ID NO: 306, SEQ ID NO: 307, SEQ ID NO: 308, SEQ ID NO: 309, SEQ ID NO: 310, SEQ ID NO: 311, SEQ ID NO: 312, SEQ ID NO: 313, SEQ ID NO: 314, SEQ ID NO: 315, SEQ ID NO: 316, SEQ ID NO: 317, or SEQ ID NO: 318.

[0411] In some examples of any of the ABPCs described herein, the first antigen-binding domain includes a light chain variable domain comprising SEQ ID NO: 325, and a heavy chain variable domain comprising: SEQ ID NO: 268, SEQ ID NO: 276, SEQ ID NO: 277, SEQ ID NO: 278, SEQ ID NO: 279, SEQ ID NO: 280, SEQ ID NO: 281, SEQ ID NO: 282, SEQ ID NO: 283, SEQ ID NO: 284, SEQ ID NO: 285, SEQ ID NO: 286, SEQ ID NO: 287, SEQ ID NO: 288, SEQ ID NO: 289, SEQ ID NO: 290, SEQ ID NO: 291, SEQ ID NO: 292, SEQ ID NO: 293, SEQ ID NO: 294, SEQ ID NO: 295, SEQ ID NO: 296, SEQ ID NO: 297, SEQ ID NO: 298, SEQ ID NO: 299, SEQ ID NO: 300, SEQ ID NO: 301, SEQ ID NO: 302, SEQ ID NO: 303, SEQ ID NO: 304, SEQ ID NO: 305, SEQ ID NO: 306, SEQ ID NO: 307, SEQ ID NO: 308, SEQ ID NO: 309, SEQ ID NO: 310, SEQ ID NO: 311, SEQ ID NO: 312, SEQ ID NO: 313, SEQ ID NO: 314, SEQ ID NO: 315, SEQ ID NO: 316, SEQ ID NO: 317, or SEQ ID NO: 318.

[0412] In some examples of any of the ABPCs described herein, the first antigen-binding domain includes a light chain variable domain comprising SEQ ID NO: 326, and a heavy chain variable domain comprising: SEQ ID NO: 268, SEQ ID NO: 276, SEQ ID NO: 277, SEQ ID NO: 278, SEQ ID NO: 279, SEQ ID NO: 280, SEQ ID NO: 281, SEQ ID NO: 282, SEQ ID NO: 283, SEQ ID NO: 284, SEQ ID NO: 285, SEQ ID NO: 286, SEQ ID NO: 287, SEQ ID NO: 288, SEQ ID NO: 289, SEQ ID NO: 290, SEQ ID NO: 291, SEQ ID NO: 292, SEQ ID NO: 293, SEQ ID NO: 294, SEQ ID NO: 295, SEQ ID NO: 296, SEQ ID NO: 297, SEQ ID NO: 298, SEQ ID NO: 299, SEQ ID NO: 300, SEQ ID NO: 301, SEQ ID NO: 302, SEQ ID NO: 303, SEQ ID NO: 304, SEQ ID NO: 305, SEQ ID NO: 306, SEQ ID NO: 307, SEQ ID NO: 308, SEQ ID NO: 309, SEQ ID NO: 310, SEQ ID NO: 311, SEQ ID NO: 312, SEQ ID NO: 313, SEQ ID NO: 314, SEQ ID NO: 315, SEQ ID NO: 316, SEQ ID NO: 317, or SEQ ID NO: 318.

[0413] In some examples of any of the ABPCs described herein, the first antigen-binding domain includes a light chain variable domain comprising SEQ ID NO: 327, and a heavy chain variable domain comprising: SEQ ID NO: 268, SEQ ID NO: 276, SEQ ID NO: 277, SEQ ID NO: 278, SEQ ID NO: 279, SEQ ID NO: 280, SEQ ID NO: 281, SEQ ID NO: 282, SEQ ID NO: 283, SEQ ID NO: 284, SEQ ID NO: 285, SEQ ID NO: 286, SEQ ID NO: 287, SEQ ID NO: 288, SEQ ID NO: 289, SEQ ID NO: 290, SEQ ID NO: 291, SEQ ID NO: 292, SEQ ID NO: 293, SEQ ID NO: 294, SEQ ID NO: 295, SEQ ID NO: 296, SEQ ID NO: 297, SEQ ID NO: 298, SEQ ID NO: 299, SEQ ID NO: 300, SEQ ID NO: 301, SEQ ID NO: 302, SEQ ID NO: 303, SEQ ID NO: 304, SEQ ID NO: 305, SEQ ID NO: 306, SEQ ID NO: 307, SEQ ID NO: 308, SEQ ID NO: 309, SEQ ID NO: 310, SEQ ID NO: 311, SEQ ID NO: 312, SEQ ID NO: 313, SEQ ID NO: 314, SEQ ID NO: 315, SEQ ID NO: 316, SEQ ID NO: 317, or SEQ ID NO: 318.

[0414] In some examples of any of the ABPCs described herein, the first antigen-binding domain includes a light chain variable domain comprising SEQ ID NO: 328, and a heavy chain variable domain comprising: SEQ ID NO: 268, SEQ ID NO: 276, SEQ ID NO: 277, SEQ ID NO: 278, SEQ ID NO: 279, SEQ ID NO: 280, SEQ ID NO: 281, SEQ ID NO: 282, SEQ ID NO: 283, SEQ ID NO: 284, SEQ ID NO: 285, SEQ ID NO: 286, SEQ ID NO: 287, SEQ ID NO: 288, SEQ ID NO: 289, SEQ ID NO: 290, SEQ ID NO: 291, SEQ ID NO: 292, SEQ ID NO: 293, SEQ ID NO: 294, SEQ ID NO: 295, SEQ ID NO: 296, SEQ ID NO: 297, SEQ ID NO: 298, SEQ ID NO: 299, SEQ ID NO: 300, SEQ ID NO: 301, SEQ ID NO: 302, SEQ ID NO: 303, SEQ ID NO: 304, SEQ ID NO: 305, SEQ ID NO: 306, SEQ ID NO: 307, SEQ ID NO: 308, SEQ ID NO: 309, SEQ ID NO: 310, SEQ ID NO: 311, SEQ ID NO: 312, SEQ ID NO: 313, SEQ ID NO: 314, SEQ ID NO: 315, SEQ ID NO: 316, SEQ ID NO: 317, or SEQ ID NO: 318.

[0415] In some examples of any of the ABPCs described herein, the first antigen-binding domain includes a light chain variable domain comprising SEQ ID NO: 329, and a heavy chain variable domain comprising: SEQ ID NO: 268, SEQ ID NO: 276, SEQ ID NO: 277, SEQ ID NO: 278, SEQ ID NO: 279, SEQ ID NO: 280, SEQ ID NO: 281, SEQ ID NO: 282, SEQ ID NO: 283, SEQ ID NO: 284, SEQ ID NO: 285, SEQ ID NO: 286, SEQ ID NO: 287, SEQ ID NO: 288, SEQ ID NO: 289, SEQ ID NO: 290, SEQ ID NO: 291, SEQ ID NO: 292, SEQ ID NO: 293, SEQ ID NO: 294, SEQ ID NO: 295, SEQ ID NO: 296, SEQ ID NO: 297, SEQ ID NO: 298, SEQ ID NO: 299, SEQ ID NO: 300, SEQ ID NO: 301, SEQ ID NO: 302, SEQ ID NO: 303, SEQ ID NO: 304, SEQ ID NO: 305, SEQ ID NO: 306, SEQ ID NO: 307, SEQ ID NO: 308, SEQ ID NO: 309, SEQ ID NO: 310, SEQ ID NO: 311, SEQ ID NO: 312, SEQ ID NO: 313, SEQ ID NO: 314, SEQ ID NO: 315, SEQ ID NO: 316, SEQ ID NO: 317, or SEQ ID NO: 318.

[0416] In some examples of any of the ABPCs described herein, the first antigen-binding domain includes a light chain variable domain comprising SEQ ID NO: 330, and a heavy chain variable domain comprising: SEQ ID NO: 268, SEQ ID NO: 276, SEQ ID NO: 277, SEQ ID NO: 278, SEQ ID NO: 279, SEQ ID NO: 280, SEQ ID NO: 281, SEQ ID NO: 282, SEQ ID NO: 283, SEQ ID NO: 284, SEQ ID NO: 285, SEQ ID NO: 286, SEQ ID NO: 287, SEQ ID NO: 288, SEQ ID NO: 289, SEQ ID NO: 290, SEQ ID NO: 291, SEQ ID NO: 292, SEQ ID NO: 293, SEQ ID NO: 294, SEQ ID NO: 295, SEQ ID NO: 296, SEQ ID NO: 297, SEQ ID NO: 298, SEQ ID NO: 299, SEQ ID NO: 300, SEQ ID NO: 301, SEQ ID NO: 302, SEQ ID NO: 303, SEQ ID NO: 304, SEQ ID NO: 305, SEQ ID NO: 306, SEQ ID NO: 307, SEQ ID NO: 308, SEQ ID NO: 309, SEQ ID NO: 310, SEQ ID NO: 311, SEQ ID NO: 312, SEQ ID NO: 313, SEQ ID NO: 314, SEQ ID NO: 315, SEQ ID NO: 316, SEQ ID NO: 317, or SEQ ID NO: 318.

[0417] In some examples of any of the ABPCs described herein, the first antigen-binding domain includes a light chain variable domain comprising SEQ ID NO: 331, and a heavy chain variable domain comprising: SEQ ID NO: 268, SEQ ID NO: 276, SEQ ID NO: 277, SEQ ID NO: 278, SEQ ID NO: 279, SEQ ID NO: 280, SEQ ID NO: 281, SEQ ID NO: 282, SEQ ID NO: 283, SEQ ID NO: 284, SEQ ID NO: 285, SEQ ID NO: 286, SEQ ID NO: 287, SEQ ID NO: 288, SEQ ID NO: 289, SEQ ID NO: 290, SEQ ID NO: 291, SEQ ID NO: 292, SEQ ID NO: 293, SEQ ID NO: 294, SEQ ID NO: 295, SEQ ID NO: 296, SEQ ID NO: 297, SEQ ID NO: 298, SEQ ID NO: 299, SEQ ID NO: 300, SEQ ID NO: 301, SEQ ID NO: 302, SEQ ID NO: 303, SEQ ID NO: 304, SEQ ID NO: 305, SEQ ID NO: 306, SEQ ID NO: 307, SEQ ID NO: 308, SEQ ID NO: 309, SEQ ID NO: 310, SEQ ID NO: 311, SEQ ID NO: 312, SEQ ID NO: 313, SEQ ID NO: 314, SEQ ID NO: 315, SEQ ID NO: 316, SEQ ID NO: 317, or SEQ ID NO: 318.

[0418] In some examples of any of the ABPCs described herein, the first antigen-binding domain includes a light chain variable domain comprising SEQ ID NO: 332, and a heavy chain variable domain comprising: SEQ ID NO: 268, SEQ ID NO: 276, SEQ ID NO: 277, SEQ ID NO: 278, SEQ ID NO: 279, SEQ ID NO: 280, SEQ ID NO: 281, SEQ ID NO: 282, SEQ ID NO: 283, SEQ ID NO: 284, SEQ ID NO: 285, SEQ ID NO: 286, SEQ ID NO: 287, SEQ ID NO: 288, SEQ ID NO: 289, SEQ ID NO: 290, SEQ ID NO: 291, SEQ ID NO: 292, SEQ ID NO: 293, SEQ ID NO: 294, SEQ ID NO: 295, SEQ ID NO: 296, SEQ ID NO: 297, SEQ ID NO: 298, SEQ ID NO: 299, SEQ ID NO: 300, SEQ ID NO: 301, SEQ ID NO: 302, SEQ ID NO: 303, SEQ ID NO: 304, SEQ ID NO: 305, SEQ ID NO: 306, SEQ ID NO: 307, SEQ ID NO: 308, SEQ ID NO: 309, SEQ ID NO: 310, SEQ ID NO: 311, SEQ ID NO: 312, SEQ ID NO: 313, SEQ ID NO: 314, SEQ ID NO: 315, SEQ ID NO: 316, SEQ ID NO: 317, or SEQ ID NO: 318.

[0419] In some examples of any of the ABPCs described herein, the first antigen-binding domain includes a light chain variable domain comprising SEQ ID NO: 333, and a heavy chain variable domain comprising: SEQ ID NO: 268, SEQ ID NO: 276, SEQ ID NO: 277, SEQ ID NO: 278, SEQ ID NO: 279, SEQ ID NO: 280, SEQ ID NO: 281, SEQ ID NO: 282, SEQ ID NO: 283, SEQ ID NO: 284, SEQ ID NO: 285, SEQ ID NO: 286, SEQ ID NO: 287, SEQ ID NO: 288, SEQ ID NO: 289, SEQ ID NO: 290, SEQ ID NO: 291, SEQ ID NO: 292, SEQ ID NO: 293, SEQ ID NO: 294, SEQ ID NO: 295, SEQ ID NO: 296, SEQ ID NO: 297, SEQ ID NO: 298, SEQ ID NO: 299, SEQ ID NO: 300, SEQ ID NO: 301, SEQ ID NO: 302, SEQ ID NO: 303, SEQ ID NO: 304, SEQ ID NO: 305, SEQ ID NO: 306, SEQ ID NO: 307, SEQ ID NO: 308, SEQ ID NO: 309, SEQ ID NO: 310, SEQ ID NO: 311, SEQ ID NO: 312, SEQ ID NO: 313, SEQ ID NO: 314, SEQ ID NO: 315, SEQ ID NO: 316, SEQ ID NO: 317, or SEQ ID NO: 318.

[0420] In some examples of any of the ABPCs described herein, the first antigen-binding domain includes a light chain variable domain comprising SEQ ID NO: 334, and a heavy chain variable domain comprising: SEQ ID NO: 268, SEQ ID NO: 276, SEQ ID NO: 277, SEQ ID NO: 278, SEQ ID NO: 279, SEQ ID NO: 280, SEQ ID NO: 281, SEQ ID NO: 282, SEQ ID NO: 283, SEQ ID NO: 284, SEQ ID NO: 285, SEQ ID NO: 286, SEQ ID NO: 287, SEQ ID NO: 288, SEQ ID NO: 289, SEQ ID NO: 290, SEQ ID NO: 291, SEQ ID NO: 292, SEQ ID NO: 293, SEQ ID NO: 294, SEQ ID NO: 295, SEQ ID NO: 296, SEQ ID NO: 297, SEQ ID NO: 298, SEQ ID NO: 299, SEQ ID NO: 300, SEQ ID NO: 301, SEQ ID NO: 302, SEQ ID NO: 303, SEQ ID NO: 304, SEQ ID NO: 305, SEQ ID NO: 306, SEQ ID NO: 307, SEQ ID NO: 308, SEQ ID NO: 309, SEQ ID NO: 310, SEQ ID NO: 311, SEQ ID NO: 312, SEQ ID NO: 313, SEQ ID NO: 314, SEQ ID NO: 315, SEQ ID NO: 316, SEQ ID NO: 317, or SEQ ID NO: 318.

[0421] In some examples of any of the ABPCs described herein, the first antigen-binding domain includes a light chain variable domain comprising SEQ ID NO: 335, and a heavy chain variable domain comprising: SEQ ID NO: 268, SEQ ID NO: 276, SEQ ID NO: 277, SEQ ID NO: 278, SEQ ID NO: 279, SEQ ID NO: 280, SEQ ID NO: 281, SEQ ID NO: 282, SEQ ID NO: 283, SEQ ID NO: 284, SEQ ID NO: 285, SEQ ID NO: 286, SEQ ID NO: 287, SEQ ID NO: 288, SEQ ID NO: 289, SEQ ID NO: 290, SEQ ID NO: 291, SEQ ID NO: 292, SEQ ID NO: 293, SEQ ID NO: 294, SEQ ID NO: 295, SEQ ID NO: 296, SEQ ID NO: 297, SEQ ID NO: 298, SEQ ID NO: 299, SEQ ID NO: 300, SEQ ID NO: 301, SEQ ID NO: 302, SEQ ID NO: 303, SEQ ID NO: 304, SEQ ID NO: 305, SEQ ID NO: 306, SEQ ID NO: 307, SEQ ID NO: 308, SEQ ID NO: 309, SEQ ID NO: 310, SEQ ID NO: 311, SEQ ID NO: 312, SEQ ID NO: 313, SEQ ID NO: 314, SEQ ID NO: 315, SEQ ID NO: 316, SEQ ID NO: 317, or SEQ ID NO: 318.

[0422] In some examples of any of the ABPCs described herein, the first antigen-binding domain includes a light chain variable domain comprising SEQ ID NO: 336, and a heavy chain variable domain comprising: SEQ ID NO: 268, SEQ ID NO: 276, SEQ ID NO: 277, SEQ ID NO: 278, SEQ ID NO: 279, SEQ ID NO: 280, SEQ ID NO: 281, SEQ ID NO: 282, SEQ ID NO: 283, SEQ ID NO: 284, SEQ ID NO: 285, SEQ ID NO: 286, SEQ ID NO: 287, SEQ ID NO: 288, SEQ ID NO: 289, SEQ ID NO: 290, SEQ ID NO: 291, SEQ ID NO: 292, SEQ ID NO: 293, SEQ ID NO: 294, SEQ ID NO: 295, SEQ ID NO: 296, SEQ ID NO: 297, SEQ ID NO: 298, SEQ ID NO: 299, SEQ ID NO: 300, SEQ ID NO: 301, SEQ ID NO: 302, SEQ ID NO: 303, SEQ ID NO: 304, SEQ ID NO: 305, SEQ ID NO: 306, SEQ ID NO: 307, SEQ ID NO: 308, SEQ ID NO: 309, SEQ ID NO: 310, SEQ ID NO: 311, SEQ ID NO: 312, SEQ ID NO: 313, SEQ ID NO: 314, SEQ ID NO: 315, SEQ ID NO: 316, SEQ ID NO: 317, or SEQ ID NO: 318.

[0423] In some examples of any of the ABPCs described herein, the first antigen-binding domain includes a light chain variable domain comprising SEQ ID NO: 337, and a heavy chain variable domain comprising: SEQ ID NO: 268, SEQ ID NO: 276, SEQ ID NO: 277, SEQ ID NO: 278, SEQ ID NO: 279, SEQ ID NO: 280, SEQ ID NO: 281, SEQ ID NO: 282, SEQ ID NO: 283, SEQ ID NO: 284, SEQ ID NO: 285, SEQ ID NO: 286, SEQ ID NO: 287, SEQ ID NO: 288, SEQ ID NO: 289, SEQ ID NO: 290, SEQ ID NO: 291, SEQ ID NO: 292, SEQ ID NO: 293, SEQ ID NO: 294, SEQ ID NO: 295, SEQ ID NO: 296, SEQ ID NO: 297, SEQ ID NO: 298, SEQ ID NO: 299, SEQ ID NO: 300, SEQ ID NO: 301, SEQ ID NO: 302, SEQ ID NO: 303, SEQ ID NO: 304, SEQ ID NO: 305, SEQ ID NO: 306, SEQ ID NO: 307, SEQ ID NO: 308, SEQ ID NO: 309, SEQ ID NO: 310, SEQ ID NO: 311, SEQ ID NO: 312, SEQ ID NO: 313, SEQ ID NO: 314, SEQ ID NO: 315, SEQ ID NO: 316, SEQ ID NO: 317, or SEQ ID NO: 318.

[0424] In some examples of any of the ABPCs described herein, the first antigen-binding domain includes a light chain variable domain comprising SEQ ID NO: 338, and a heavy chain variable domain comprising: SEQ ID NO: 268, SEQ ID NO: 276, SEQ ID NO: 277, SEQ ID NO: 278, SEQ ID NO: 279, SEQ ID NO: 280, SEQ ID NO: 281, SEQ ID NO: 282, SEQ ID NO: 283, SEQ ID NO: 284, SEQ ID NO: 285, SEQ ID NO: 286, SEQ ID NO: 287, SEQ ID NO: 288, SEQ ID NO: 289, SEQ ID NO: 290, SEQ ID NO: 291, SEQ ID NO: 292, SEQ ID NO: 293, SEQ ID NO: 294, SEQ ID NO: 295, SEQ ID NO: 296, SEQ ID NO: 297, SEQ ID NO: 298, SEQ ID NO: 299, SEQ ID NO: 300, SEQ ID NO: 301, SEQ ID NO: 302, SEQ ID NO: 303, SEQ ID NO: 304, SEQ ID NO: 305, SEQ ID NO: 306, SEQ ID NO: 307, SEQ ID NO: 308, SEQ ID NO: 309, SEQ ID NO: 310, SEQ ID NO: 311, SEQ ID NO: 312, SEQ ID NO: 313, SEQ ID NO: 314, SEQ ID NO: 315, SEQ ID NO: 316, SEQ ID NO: 317, or SEQ ID NO: 318.

[0425] In some examples of any of the ABPCs described herein, the first antigen-binding domain includes a light chain variable domain comprising SEQ ID NO: 339, and a heavy chain variable domain comprising: SEQ ID NO: 268, SEQ ID NO: 276, SEQ ID NO: 277, SEQ ID NO: 278, SEQ ID NO: 279, SEQ ID NO: 280, SEQ ID NO: 281, SEQ ID NO: 282, SEQ ID NO: 283, SEQ ID NO: 284, SEQ ID NO: 285, SEQ ID NO: 286, SEQ ID NO: 287, SEQ ID NO: 288, SEQ ID NO: 289, SEQ ID NO: 290, SEQ ID NO: 291, SEQ ID NO: 292, SEQ ID NO: 293, SEQ ID NO: 294, SEQ ID NO: 295, SEQ ID NO: 296, SEQ ID NO: 297, SEQ ID NO: 298, SEQ ID NO: 299, SEQ ID NO: 300, SEQ ID NO: 301, SEQ ID NO: 302, SEQ ID NO: 303, SEQ ID NO: 304, SEQ ID NO: 305, SEQ ID NO: 306, SEQ ID NO: 307, SEQ ID NO: 308, SEQ ID NO: 309, SEQ ID NO: 310, SEQ ID NO: 311, SEQ ID NO: 312, SEQ ID NO: 313, SEQ ID NO: 314, SEQ ID NO: 315, SEQ ID NO: 316, SEQ ID NO: 317, or SEQ ID NO: 318.

[0426] In some examples of any of the ABPCs described herein, the first antigen-binding domain includes a light chain variable domain comprising SEQ ID NO: 340, and a heavy chain variable domain comprising: SEQ ID NO: 268, SEQ ID NO: 276, SEQ ID NO: 277, SEQ ID NO: 278, SEQ ID NO: 279, SEQ ID NO: 280, SEQ ID NO: 281, SEQ ID NO: 282, SEQ ID NO: 283, SEQ ID NO: 284, SEQ ID NO: 285, SEQ ID NO: 286, SEQ ID NO: 287, SEQ ID NO: 288, SEQ ID NO: 289, SEQ ID NO: 290, SEQ ID NO: 291, SEQ ID NO: 292, SEQ ID NO: 293, SEQ ID NO: 294, SEQ ID NO: 295, SEQ ID NO: 296, SEQ ID NO: 297, SEQ ID NO: 298, SEQ ID NO: 299, SEQ ID NO: 300, SEQ ID NO: 301, SEQ ID NO: 302, SEQ ID NO: 303, SEQ ID NO: 304, SEQ ID NO: 305, SEQ ID NO: 306, SEQ ID NO: 307, SEQ ID NO: 308, SEQ ID NO: 309, SEQ ID NO: 310, SEQ ID NO: 311, SEQ ID NO: 312, SEQ ID NO: 313, SEQ ID NO: 314, SEQ ID NO: 315, SEQ ID NO: 316, SEQ ID NO: 317, or SEQ ID NO: 318.

[0427] In some examples of any of the ABPCs described herein, the first antigen-binding domain includes a light chain variable domain comprising SEQ ID NO: 341, and a heavy chain variable domain comprising: SEQ ID NO: 268, SEQ ID NO: 276, SEQ ID NO: 277, SEQ ID NO: 278, SEQ ID NO: 279, SEQ ID NO: 280, SEQ ID NO: 281, SEQ ID NO: 282, SEQ ID NO: 283, SEQ ID NO: 284, SEQ ID NO: 285, SEQ ID NO: 286, SEQ ID NO: 287, SEQ ID NO: 288, SEQ ID NO: 289, SEQ ID NO: 290, SEQ ID NO: 291, SEQ ID NO: 292, SEQ ID NO: 293, SEQ ID NO: 294, SEQ ID NO: 295, SEQ ID NO: 296, SEQ ID NO: 297, SEQ ID NO: 298, SEQ ID NO: 299, SEQ ID NO: 300, SEQ ID NO: 301, SEQ ID NO: 302, SEQ ID NO: 303, SEQ ID NO: 304, SEQ ID NO: 305, SEQ ID NO: 306, SEQ ID NO: 307, SEQ ID NO: 308, SEQ ID NO: 309, SEQ ID NO: 310, SEQ ID NO: 311, SEQ ID NO: 312, SEQ ID NO: 313, SEQ ID NO: 314, SEQ ID NO: 315, SEQ ID NO: 316, SEQ ID NO: 317, or SEQ ID NO: 318.

[0428] In some examples of any of the ABPCs described herein, the first antigen-binding domain includes a light chain variable domain comprising SEQ ID NO: 342, and a heavy chain variable domain comprising: SEQ ID NO: 268, SEQ ID NO: 276, SEQ ID NO: 277, SEQ ID NO: 278, SEQ ID NO: 279, SEQ ID NO: 280, SEQ ID NO: 281, SEQ ID NO: 282, SEQ ID NO: 283, SEQ ID NO: 284, SEQ ID NO: 285, SEQ ID NO: 286, SEQ ID NO: 287, SEQ ID NO: 288, SEQ ID NO: 289, SEQ ID NO: 290, SEQ ID NO: 291, SEQ ID NO: 292, SEQ ID NO: 293, SEQ ID NO: 294, SEQ ID NO: 295, SEQ ID NO: 296, SEQ ID NO: 297, SEQ ID NO: 298, SEQ ID NO: 299, SEQ ID NO: 300, SEQ ID NO: 301, SEQ ID NO: 302, SEQ ID NO: 303, SEQ ID NO: 304, SEQ ID NO: 305, SEQ ID NO: 306, SEQ ID NO: 307, SEQ ID NO: 308, SEQ ID NO: 309, SEQ ID NO: 310, SEQ ID NO: 311, SEQ ID NO: 312, SEQ ID NO: 313, SEQ ID NO: 314, SEQ ID NO: 315, SEQ ID NO: 316, SEQ ID NO: 317, or SEQ ID NO: 318.

[0429] In some examples of any of the ABPCs described herein, the first antigen-binding domain includes a light chain variable domain comprising SEQ ID NO: 343, and a heavy chain variable domain comprising: SEQ ID NO: 268, SEQ ID NO: 276, SEQ ID NO: 277, SEQ ID NO: 278, SEQ ID NO: 279, SEQ ID NO: 280, SEQ ID NO: 281, SEQ ID NO: 282, SEQ ID NO: 283, SEQ ID NO: 284, SEQ ID NO: 285, SEQ ID NO: 286, SEQ ID NO: 287, SEQ ID NO: 288, SEQ ID NO: 289, SEQ ID NO: 290, SEQ ID NO: 291, SEQ ID NO: 292, SEQ ID NO: 293, SEQ ID NO: 294, SEQ ID NO: 295, SEQ ID NO: 296, SEQ ID NO: 297, SEQ ID NO: 298, SEQ ID NO: 299, SEQ ID NO: 300, SEQ ID NO: 301, SEQ ID NO: 302, SEQ ID NO: 303, SEQ ID NO: 304, SEQ ID NO: 305, SEQ ID NO: 306, SEQ ID NO: 307, SEQ ID NO: 308, SEQ ID NO: 309, SEQ ID NO: 310, SEQ ID NO: 311, SEQ ID NO: 312, SEQ ID NO: 313, SEQ ID NO: 314, SEQ ID NO: 315, SEQ ID NO: 316, SEQ ID NO: 317, or SEQ ID NO: 318.

[0430] In some examples of any of the ABPCs described herein, the first antigen-binding domain includes a light chain variable domain comprising SEQ ID NO: 344, and a heavy chain variable domain comprising: SEQ ID NO: 268, SEQ ID NO: 276, SEQ ID NO: 277, SEQ ID NO: 278, SEQ ID NO: 279, SEQ ID NO: 280, SEQ ID NO: 281, SEQ ID NO: 282, SEQ ID NO: 283, SEQ ID NO: 284, SEQ ID NO: 285, SEQ ID NO: 286, SEQ ID NO: 287, SEQ ID NO: 288, SEQ ID NO: 289, SEQ ID NO: 290, SEQ ID NO: 291, SEQ ID NO: 292, SEQ ID NO: 293, SEQ ID NO: 294, SEQ ID NO: 295, SEQ ID NO: 296, SEQ ID NO: 297, SEQ ID NO: 298, SEQ ID NO: 299, SEQ ID NO: 300, SEQ ID NO: 301, SEQ ID NO: 302, SEQ ID NO: 303, SEQ ID NO: 304, SEQ ID NO: 305, SEQ ID NO: 306, SEQ ID NO: 307, SEQ ID NO: 308, SEQ ID NO: 309, SEQ ID NO: 310, SEQ ID NO: 311, SEQ ID NO: 312, SEQ ID NO: 313, SEQ ID NO: 314, SEQ ID NO: 315, SEQ ID NO: 316, SEQ ID NO: 317, or SEQ ID NO: 318.

[0431] In some examples of any of the ABPCs described herein, the first antigen-binding domain includes a light chain variable domain comprising SEQ ID NO: 345, and a heavy chain variable domain comprising: SEQ ID NO: 268, SEQ ID NO: 276, SEQ ID NO: 277, SEQ ID NO: 278, SEQ ID NO: 279, SEQ ID NO: 280, SEQ ID NO: 281, SEQ ID NO: 282, SEQ ID NO: 283, SEQ ID NO: 284, SEQ ID NO: 285, SEQ ID NO: 286, SEQ ID NO: 287, SEQ ID NO: 288, SEQ ID NO: 289, SEQ ID NO: 290, SEQ ID NO: 291, SEQ ID NO: 292, SEQ ID NO: 293, SEQ ID NO: 294, SEQ ID NO: 295, SEQ ID NO: 296, SEQ ID NO: 297, SEQ ID NO: 298, SEQ ID NO: 299, SEQ ID NO: 300, SEQ ID NO: 301, SEQ ID NO: 302, SEQ ID NO: 303, SEQ ID NO: 304, SEQ ID NO: 305, SEQ ID NO: 306, SEQ ID NO: 307, SEQ ID NO: 308, SEQ ID NO: 309, SEQ ID NO: 310, SEQ ID NO: 311, SEQ ID NO: 312, SEQ ID NO: 313, SEQ ID NO: 314, SEQ ID NO: 315, SEQ ID NO: 316, SEQ ID NO: 317, or SEQ ID NO: 318.

[0432] In some examples of any of the ABPCs described herein, the first antigen-binding domain includes a heavy chain variable domain of SEQ ID NO: 346, SEQ ID NO: 347, SEQ ID NO: 348, SEQ ID NO: 349, SEQ ID NO: 350, SEQ ID NO: 351, SEQ ID NO: 352, SEQ ID NO: 353, SEQ ID NO: 354, SEQ ID NO: 355, SEQ ID NO: 356, SEQ ID NO: 357, SEQ ID NO: 358, SEQ ID NO: 359, SEQ ID NO: 360, SEQ ID NO: 361, SEQ ID NO: 362, SEQ ID NO: 363, SEQ ID NO: 364, SEQ ID NO: 365.

[0433] In some examples of any of the ABPCs described herein, the first antigen-binding domain includes a heavy chain variable domain comprising SEQ ID NO: 346, and a light chain variable domain comprising: SEQ ID NO: 269, SEQ ID NO: 319, SEQ ID NO: 320, SEQ ID NO: 321, SEQ ID NO: 322, SEQ ID NO: 323, SEQ ID NO: 324, SEQ ID NO: 325, SEQ ID NO: 326, SEQ ID NO: 327, SEQ ID NO: 328, SEQ ID NO: 329, SEQ ID NO: 330, SEQ ID NO: 331, SEQ ID NO: 332, SEQ ID NO: 333, SEQ ID NO: 334, SEQ ID NO: 335, SEQ ID NO: 336, SEQ ID NO: 337, SEQ ID NO: 338, SEQ ID NO: 339, SEQ ID NO: 340, SEQ ID NO: 341, SEQ ID NO: 342, SEQ ID NO: 343, SEQ ID NO: 344, or SEQ ID NO: 345.

[0434] In some examples of any of the ABPCs described herein, the first antigen-binding domain includes a heavy chain variable domain comprising SEQ ID NO: 347, and a light chain variable domain comprising: SEQ ID NO: 269, SEQ ID NO: 319, SEQ ID NO: 320, SEQ ID NO: 321, SEQ ID NO: 322, SEQ ID NO: 323, SEQ ID NO: 324, SEQ ID NO: 325, SEQ ID NO: 326, SEQ ID NO: 327, SEQ ID NO: 328, SEQ ID NO: 329, SEQ ID NO: 330, SEQ ID NO: 331, SEQ ID NO: 332, SEQ ID NO: 333, SEQ ID NO: 334, SEQ ID NO: 335, SEQ ID NO: 336, SEQ ID NO: 337, SEQ ID NO: 338, SEQ ID NO: 339, SEQ ID NO: 340, SEQ ID NO: 341, SEQ ID NO: 342, SEQ ID NO: 343, SEQ ID NO: 344, or SEQ ID NO: 345.

[0435] In some examples of any of the ABPCs described herein, the first antigen-binding domain includes a heavy chain variable domain comprising SEQ ID NO: 348, and a light chain variable domain comprising: SEQ ID NO: 269, SEQ ID NO: 319, SEQ ID NO: 320, SEQ ID NO: 321, SEQ ID NO: 322, SEQ ID NO: 323, SEQ ID NO: 324, SEQ ID NO: 325, SEQ ID NO: 326, SEQ ID NO: 327, SEQ ID NO: 328, SEQ ID NO: 329, SEQ ID NO: 330, SEQ ID NO: 331, SEQ ID NO: 332, SEQ ID NO: 333, SEQ ID NO: 334, SEQ ID NO: 335, SEQ ID NO: 336, SEQ ID NO: 337, SEQ ID NO: 338, SEQ ID NO: 339, SEQ ID NO: 340, SEQ ID NO: 341, SEQ ID NO: 342, SEQ ID NO: 343, SEQ ID NO: 344, or SEQ ID NO: 345.

[0436] In some examples of any of the ABPCs described herein, the first antigen-binding domain includes a heavy chain variable domain comprising SEQ ID NO: 349, and a light chain variable domain comprising: SEQ ID NO: 269, SEQ ID NO: 319, SEQ ID NO: 320, SEQ ID NO: 321, SEQ ID NO: 322, SEQ ID NO: 323, SEQ ID NO: 324, SEQ ID NO: 325, SEQ ID NO: 326, SEQ ID NO: 327, SEQ ID NO: 328, SEQ ID NO: 329, SEQ ID NO: 330, SEQ ID NO: 331, SEQ ID NO: 332, SEQ ID NO: 333, SEQ ID NO: 334, SEQ ID NO: 335, SEQ ID NO: 336, SEQ ID NO: 337, SEQ ID NO: 338, SEQ ID NO: 339, SEQ ID NO: 340, SEQ ID NO: 341, SEQ ID NO: 342, SEQ ID NO: 343, SEQ ID NO: 344, or SEQ ID NO: 345.

[0437] In some examples of any of the ABPCs described herein, the first antigen-binding domain includes a heavy chain variable domain comprising SEQ ID NO: 350, and a light chain variable domain comprising: SEQ ID NO: 269, SEQ ID NO: 319, SEQ ID NO: 320, SEQ ID NO: 321, SEQ ID NO: 322, SEQ ID NO: 323, SEQ ID NO: 324, SEQ ID NO: 325, SEQ ID NO: 326, SEQ ID NO: 327, SEQ ID NO: 328, SEQ ID NO: 329, SEQ ID NO: 330, SEQ ID NO: 331, SEQ ID NO: 332, SEQ ID NO: 333, SEQ ID NO: 334, SEQ ID NO: 335, SEQ ID NO: 336, SEQ ID NO: 337, SEQ ID NO: 338, SEQ ID NO: 339, SEQ ID NO: 340, SEQ ID NO: 341, SEQ ID NO: 342, SEQ ID NO: 343, SEQ ID NO: 344, or SEQ ID NO: 345.

[0438] In some examples of any of the ABPCs described herein, the first antigen-binding domain includes a heavy chain variable domain comprising SEQ ID NO: 351, and a light chain variable domain comprising: SEQ ID NO: 269, SEQ ID NO: 319, SEQ ID NO: 320, SEQ ID NO: 321, SEQ ID NO: 322, SEQ ID NO: 323, SEQ ID NO: 324, SEQ ID NO: 325, SEQ ID NO: 326, SEQ ID NO: 327, SEQ ID NO: 328, SEQ ID NO: 329, SEQ ID NO: 330, SEQ ID NO: 331, SEQ ID NO: 332, SEQ ID NO: 333, SEQ ID NO: 334, SEQ ID NO: 335, SEQ ID NO: 336, SEQ ID NO: 337, SEQ ID NO: 338, SEQ ID NO: 339, SEQ ID NO: 340, SEQ ID NO: 341, SEQ ID NO: 342, SEQ ID NO: 343, SEQ ID NO: 344, or SEQ ID NO: 345.

[0439] In some examples of any of the ABPCs described herein, the first antigen-binding domain includes a heavy chain variable domain comprising SEQ ID NO: 352, and a light chain variable domain comprising: SEQ ID NO: 269, SEQ ID NO: 319, SEQ ID NO: 320, SEQ ID NO: 321, SEQ ID NO: 322, SEQ ID NO: 323, SEQ ID NO: 324, SEQ ID NO: 325, SEQ ID NO: 326, SEQ ID NO: 327, SEQ ID NO: 328, SEQ ID NO: 329, SEQ ID NO: 330, SEQ ID NO: 331, SEQ ID NO: 332, SEQ ID NO: 333, SEQ ID NO: 334, SEQ ID NO: 335, SEQ ID NO: 336, SEQ ID NO: 337, SEQ ID NO: 338, SEQ ID NO: 339, SEQ ID NO: 340, SEQ ID NO: 341, SEQ ID NO: 342, SEQ ID NO: 343, SEQ ID NO: 344, or SEQ ID NO: 345.

[0440] In some examples of any of the ABPCs described herein, the first antigen-binding domain includes a heavy chain variable domain comprising SEQ ID NO: 353, and a light chain variable domain comprising: SEQ ID NO: 269, SEQ ID NO: 319, SEQ ID NO: 320, SEQ ID NO: 321, SEQ ID NO: 322, SEQ ID NO: 323, SEQ ID NO: 324, SEQ ID NO: 325, SEQ ID NO: 326, SEQ ID NO: 327, SEQ ID NO: 328, SEQ ID NO: 329, SEQ ID NO: 330, SEQ ID NO: 331, SEQ ID NO: 332, SEQ ID NO: 333, SEQ ID NO: 334, SEQ ID NO: 335, SEQ ID NO: 336, SEQ ID NO: 337, SEQ ID NO: 338, SEQ ID NO: 339, SEQ ID NO: 340, SEQ ID NO: 341, SEQ ID NO: 342, SEQ ID NO: 343, SEQ ID NO: 344, or SEQ ID NO: 345.

[0441] In some examples of any of the ABPCs described herein, the first antigen-binding domain includes a heavy chain variable domain comprising SEQ ID NO: 354, and a light chain variable domain comprising: SEQ ID NO: 269, SEQ ID NO: 319, SEQ ID NO: 320, SEQ ID NO: 321, SEQ ID NO: 322, SEQ ID NO: 323, SEQ ID NO: 324, SEQ ID NO: 325, SEQ ID NO: 326, SEQ ID NO: 327, SEQ ID NO: 328, SEQ ID NO: 329, SEQ ID NO: 330, SEQ ID NO: 331, SEQ ID NO: 332, SEQ ID NO: 333, SEQ ID NO: 334, SEQ ID NO: 335, SEQ ID NO: 336, SEQ ID NO: 337, SEQ ID NO: 338, SEQ ID NO: 339, SEQ ID NO: 340, SEQ ID NO: 341, SEQ ID NO: 342, SEQ ID NO: 343, SEQ ID NO: 344, or SEQ ID NO: 345.

[0442] In some examples of any of the ABPCs described herein, the first antigen-binding domain includes a heavy chain variable domain comprising SEQ ID NO: 355, and a light chain variable domain comprising: SEQ ID NO: 269, SEQ ID NO: 319, SEQ ID NO: 320, SEQ ID NO: 321, SEQ ID NO: 322, SEQ ID NO: 323, SEQ ID NO: 324, SEQ ID NO: 325, SEQ ID NO: 326, SEQ ID NO: 327, SEQ ID NO: 328, SEQ ID NO: 329, SEQ ID NO: 330, SEQ ID NO: 331, SEQ ID NO: 332, SEQ ID NO: 333, SEQ ID NO: 334, SEQ ID NO: 335, SEQ ID NO: 336, SEQ ID NO: 337, SEQ ID NO: 338, SEQ ID NO: 339, SEQ ID NO: 340, SEQ ID NO: 341, SEQ ID NO: 342, SEQ ID NO: 343, SEQ ID NO: 344, or SEQ ID NO: 345.

[0443] In some examples of any of the ABPCs described herein, the first antigen-binding domain includes a heavy chain variable domain comprising SEQ ID NO: 356, and a light chain variable domain comprising: SEQ ID NO: 269, SEQ ID NO: 319, SEQ ID NO: 320, SEQ ID NO: 321, SEQ ID NO: 322, SEQ ID NO: 323, SEQ ID NO: 324, SEQ ID NO: 325, SEQ ID NO: 326, SEQ ID NO: 327, SEQ ID NO: 328, SEQ ID NO: 329, SEQ ID NO: 330, SEQ ID NO: 331, SEQ ID NO: 332, SEQ ID NO: 333, SEQ ID NO: 334, SEQ ID NO: 335, SEQ ID NO: 336, SEQ ID NO: 337, SEQ ID NO: 338, SEQ ID NO: 339, SEQ ID NO: 340, SEQ ID NO: 341, SEQ ID NO: 342, SEQ ID NO: 343, SEQ ID NO: 344, or SEQ ID NO: 345.

[0444] In some examples of any of the ABPCs described herein, the first antigen-binding domain includes a heavy chain variable domain comprising SEQ ID NO: 357, and a light chain variable domain comprising: SEQ ID NO: 269, SEQ ID NO: 319, SEQ ID NO: 320, SEQ ID NO: 321, SEQ ID NO: 322, SEQ ID NO: 323, SEQ ID NO: 324, SEQ ID NO: 325, SEQ ID NO: 326, SEQ ID NO: 327, SEQ ID NO: 328, SEQ ID NO: 329, SEQ ID NO: 330, SEQ ID NO: 331, SEQ ID NO: 332, SEQ ID NO: 333, SEQ ID NO: 334, SEQ ID NO: 335, SEQ ID NO: 336, SEQ ID NO: 337, SEQ ID NO: 338, SEQ ID NO: 339, SEQ ID NO: 340, SEQ ID NO: 341, SEQ ID NO: 342, SEQ ID NO: 343, SEQ ID NO: 344, or SEQ ID NO: 345.

[0445] In some examples of any of the ABPCs described herein, the first antigen-binding domain includes a heavy chain variable domain comprising SEQ ID NO: 358, and a light chain variable domain comprising: SEQ ID NO: 269, SEQ ID NO: 319, SEQ ID NO: 320, SEQ ID NO: 321, SEQ ID NO: 322, SEQ ID NO: 323, SEQ ID NO: 324, SEQ ID NO: 325, SEQ ID NO: 326, SEQ ID NO: 327, SEQ ID NO: 328, SEQ ID NO: 329, SEQ ID NO: 330, SEQ ID NO: 331, SEQ ID NO: 332, SEQ ID NO: 333, SEQ ID NO: 334, SEQ ID NO: 335, SEQ ID NO: 336, SEQ ID NO: 337, SEQ ID NO: 338, SEQ ID NO: 339, SEQ ID NO: 340, SEQ ID NO: 341, SEQ ID NO: 342, SEQ ID NO: 343, SEQ ID NO: 344, or SEQ ID NO: 345.

[0446] In some examples of any of the ABPCs described herein, the first antigen-binding domain includes a heavy chain variable domain comprising SEQ ID NO: 359, and a light chain variable domain comprising: SEQ ID NO: 269, SEQ ID NO: 319, SEQ ID NO: 320, SEQ ID NO: 321, SEQ ID NO: 322, SEQ ID NO: 323, SEQ ID NO: 324, SEQ ID NO: 325, SEQ ID NO: 326, SEQ ID NO: 327, SEQ ID NO: 328, SEQ ID NO: 329, SEQ ID NO: 330, SEQ ID NO: 331, SEQ ID NO: 332, SEQ ID NO: 333, SEQ ID NO: 334, SEQ ID NO: 335, SEQ ID NO: 336, SEQ ID NO: 337, SEQ ID NO: 338, SEQ ID NO: 339, SEQ ID NO: 340, SEQ ID NO: 341, SEQ ID NO: 342, SEQ ID NO: 343, SEQ ID NO: 344, or SEQ ID NO: 345.

[0447] In some examples of any of the ABPCs described herein, the first antigen-binding domain includes a heavy chain variable domain comprising SEQ ID NO: 360, and a light chain variable domain comprising: SEQ ID NO: 269, SEQ ID NO: 319, SEQ ID NO: 320, SEQ ID NO: 321, SEQ ID NO: 322, SEQ ID NO: 323, SEQ ID NO: 324, SEQ ID NO: 325, SEQ ID NO: 326, SEQ ID NO: 327, SEQ ID NO: 328, SEQ ID NO: 329, SEQ ID NO: 330, SEQ ID NO: 331, SEQ ID NO: 332, SEQ ID NO: 333, SEQ ID NO: 334, SEQ ID NO: 335, SEQ ID NO: 336, SEQ ID NO: 337, SEQ ID NO: 338, SEQ ID NO: 339, SEQ ID NO: 340, SEQ ID NO: 341, SEQ ID NO: 342, SEQ ID NO: 343, SEQ ID NO: 344, or SEQ ID NO: 345.

[0448] In some examples of any of the ABPCs described herein, the first antigen-binding domain includes a heavy chain variable domain comprising SEQ ID NO: 361, and a light chain variable domain comprising: SEQ ID NO: 269, SEQ ID NO: 319, SEQ ID NO: 320, SEQ ID NO: 321, SEQ ID NO: 322, SEQ ID NO: 323, SEQ ID NO: 324, SEQ ID NO: 325, SEQ ID NO: 326, SEQ ID NO: 327, SEQ ID NO: 328, SEQ ID NO: 329, SEQ ID NO: 330, SEQ ID NO: 331, SEQ ID NO: 332, SEQ ID NO: 333, SEQ ID NO: 334, SEQ ID NO: 335, SEQ ID NO: 336, SEQ ID NO: 337, SEQ ID NO: 338, SEQ ID NO: 339, SEQ ID NO: 340, SEQ ID NO: 341, SEQ ID NO: 342, SEQ ID NO: 343, SEQ ID NO: 344, or SEQ ID NO: 345.

[0449] In some examples of any of the ABPCs described herein, the first antigen-binding domain includes a heavy chain variable domain comprising SEQ ID NO: 362, and a light chain variable domain comprising: SEQ ID NO: 269, SEQ ID NO: 319, SEQ ID NO: 320, SEQ ID NO: 321, SEQ ID NO: 322, SEQ ID NO: 323, SEQ ID NO: 324, SEQ ID NO: 325, SEQ ID NO: 326, SEQ ID NO: 327, SEQ ID NO: 328, SEQ ID NO: 329, SEQ ID NO: 330, SEQ ID NO: 331, SEQ ID NO: 332, SEQ ID NO: 333, SEQ ID NO: 334, SEQ ID NO: 335, SEQ ID NO: 336, SEQ ID NO: 337, SEQ ID NO: 338, SEQ ID NO: 339, SEQ ID NO: 340, SEQ ID NO: 341, SEQ ID NO: 342, SEQ ID NO: 343, SEQ ID NO: 344, or SEQ ID NO: 345.

[0450] In some examples of any of the ABPCs described herein, the first antigen-binding domain includes a heavy chain variable domain comprising SEQ ID NO: 363, and a light chain variable domain comprising: SEQ ID NO: 269, SEQ ID NO: 319, SEQ ID NO: 320, SEQ ID NO: 321, SEQ ID NO: 322, SEQ ID NO: 323, SEQ ID NO: 324, SEQ ID NO: 325, SEQ ID NO: 326, SEQ ID NO: 327, SEQ ID NO: 328, SEQ ID NO: 329, SEQ ID NO: 330, SEQ ID NO: 331, SEQ ID NO: 332, SEQ ID NO: 333, SEQ ID NO: 334, SEQ ID NO: 335, SEQ ID NO: 336, SEQ ID NO: 337, SEQ ID NO: 338, SEQ ID NO: 339, SEQ ID NO: 340, SEQ ID NO: 341, SEQ ID NO: 342, SEQ ID NO: 343, SEQ ID NO: 344, or SEQ ID NO: 345.

[0451] In some examples of any of the ABPCs described herein, the first antigen-binding domain includes a heavy chain variable domain comprising SEQ ID NO: 364, and a light chain variable domain comprising: SEQ ID NO: 269, SEQ ID NO: 319, SEQ ID NO: 320, SEQ ID NO: 321, SEQ ID NO: 322, SEQ ID NO: 323, SEQ ID NO: 324, SEQ ID NO: 325, SEQ ID NO: 326, SEQ ID NO: 327, SEQ ID NO: 328, SEQ ID NO: 329, SEQ ID NO: 330, SEQ ID NO: 331, SEQ ID NO: 332, SEQ ID NO: 333, SEQ ID NO: 334, SEQ ID NO: 335, SEQ ID NO: 336, SEQ ID NO: 337, SEQ ID NO: 338, SEQ ID NO: 339, SEQ ID NO: 340, SEQ ID NO: 341, SEQ ID NO: 342, SEQ ID NO: 343, SEQ ID NO: 344, or SEQ ID NO: 345.

[0452] In some examples of any of the ABPCs described herein, the first antigen-binding domain includes a heavy chain variable domain comprising SEQ ID NO: 365, and a light chain variable domain comprising: SEQ ID NO: 269, SEQ ID NO: 319, SEQ ID NO: 320, SEQ ID NO: 321, SEQ ID NO: 322, SEQ ID NO: 323, SEQ ID NO: 324, SEQ ID NO: 325, SEQ ID NO: 326, SEQ ID NO: 327, SEQ ID NO: 328, SEQ ID NO: 329, SEQ ID NO: 330, SEQ ID NO: 331, SEQ ID NO: 332, SEQ ID NO: 333, SEQ ID NO: 334, SEQ ID NO: 335, SEQ ID NO: 336, SEQ ID NO: 337, SEQ ID NO: 338, SEQ ID NO: 339, SEQ ID NO: 340, SEQ ID NO: 341, SEQ ID NO: 342, SEQ ID NO: 343, SEQ ID NO: 344, or SEQ ID NO: 345.

[0453] In some examples of any of the ABPCs described herein, the first antigen-binding domain includes a heavy chain variable domain of ADCT-602 with one or more (e.g., one, two, three, four, five, six, seven, eight, nine, ten, eleven, twelve, thirteen, fourteen, fifteen, sixteen, seventeen, eighteen, nineteen, or twenty) amino acids substituted with a histidine. In some examples of any of the ABPCs described herein, the first antigen-binding domain includes a light chain variable domain of ADCT-602 with one or more (e.g., one, two, three, four, five, six, seven, eight, nine, ten, eleven, twelve, thirteen, fourteen, fifteen, sixteen, seventeen, eighteen, nineteen, or twenty) amino acids substituted with a histidine. In some examples of any of the ABPCs described herein, the first antigen-binding domain includes a heavy chain variable domain of ADCT-602 with one or more (e.g., one, two, three, four, five, six, seven, eight, nine, ten, eleven, twelve, thirteen, fourteen, fifteen, sixteen, seventeen, eighteen, nineteen, or twenty) amino acids substituted with a histidine; and a light chain variable domain of ADCT-602 with one or more (e.g., one, two, three, four, five, six, seven, eight, nine, ten, eleven, twelve, thirteen, fourteen, fifteen, sixteen, seventeen, eighteen, nineteen, or twenty) amino acids substituted with a histidine. In some examples of any of the ABPCs described herein, the heavy chain variable domain of ADCT-602 comprises SEQ ID NO: 366. In some examples of any of the ABPCs described herein, the light chain variable domain of ADCT-602 comprises SEQ ID NO: 367.

[0454] In some examples of any of the ABPCs described herein, the first antigen-binding domain comprises a heavy chain variable domain comprising a CDR1, a CDR2, and a CDR3 of SEQ ID NO: 368, SEQ ID NO: 369, and SEQ ID NO: 370, respectively, with collectively a total of one or more (e.g., one, two, three, four, five, six, seven, eight, nine, or ten) amino acid positions in SEQ ID NOs: 368-370 substituted with a histidine. In some examples of any of the ABPCs described herein, the first antigen-binding domain comprises a light chain variable domain comprising a CDR1, a CDR2, and a CDR3 of SEQ ID NO: 371, SEQ ID NO: 372, and SEQ ID NO: 373, respectively, with collectively a total of one or more (e.g., one, two, three, four, five, six, seven, eight, nine, or ten) amino acid positions in SEQ ID NOs: 371-373 substituted with a histidine. In some examples of any of the ABPCs described herein, the first antigen-binding domain includes: a heavy chain variable domain comprising a CDR1, a CDR2, and a CDR3 of SEQ ID NO: 368, SEQ ID NO: 369, and SEQ ID NO: 370, respectively, with collectively a total of one or more (e.g., one, two, three, four, five, six, seven, eight, nine, or ten) amino acid positions in SEQ ID NOs: 368-370 substituted with a histidine; and a light chain variable domain comprising a CDR1, a CDR2, and a CDR3 of SEQ ID NO: 371, SEQ ID NO: 372, and SEQ ID NO: 373, respectively, with collectively a total of one or more (e.g., one, two, three, four, five, six, seven, eight, nine, or ten) amino acid positions in SEQ ID NOs: 371-373 substituted with a histidine.

[0455] In some examples of any of the ABPCs described herein, the first antigen-binding domain includes a heavy chain variable domain that is at least 90% (e.g., at least 92%, at least 94%, at least 96%, at least 98%, at least 99%, or 100%) identical to SEQ ID NO: 366, where the heavy chain variable domain includes a histidine at one or more (e.g., one, two, three, four, five, six, seven, eight, nine, ten, eleven, twelve, thirteen, fourteen, fifteen, sixteen, seventeen, eighteen, nineteen, or twenty) amino acid positions in SEQ ID NO: 366 selected from the group consisting of: 32 and 33. In some examples of any of the ABPCs described herein, the first antigen-binding domain includes a light chain variable domain that is at least 90% (e.g., at least 92%, at least 94%, at least 96%, at least 98%, at least 99%, or 100%) identical to SEQ ID NO: 369. In some examples of any of the ABPCs described herein the first antigen-binding domain includes: a heavy chain variable domain that is at least 90% (e.g., at least 92%, at least 94%, at least 96%, at least 98%, at least 99%, or 100%) identical to SEQ ID NO: 366, where the heavy chain variable domain includes a histidine at one or more (e.g., one, two, three, four, five, six, seven, eight, nine, ten, eleven, twelve, thirteen, fourteen, fifteen, sixteen, seventeen, eighteen, nineteen, or twenty) amino acid positions in SEQ ID NO: 1 selected from the group consisting of: 32 and 33, and a light chain variable domain that is at least 90% (e.g., at least 92%, at least 94%, at least 96%, at least 98%, at least 99%, or 100%) identical to SEQ ID NO: 367.

[0456] In some examples of any of the ABPCs described herein, a heavy chain variable domain includes a heavy chain variable domain that is at least 90% (e.g., at least 92%, at least 94%, at least 96%, at least 98%, at least 99%, or 100%) identical to SEQ ID NO: 366, where the heavy chain variable domain includes a histidine at any of the specific combinations of one or more amino acid positions in SEQ ID NO: 366 listed in Table 7.

TABLE 7
Exemplary Combinations of Amino Acid Positions in SEQ
ID NO: 366 that can be Substituted with Histidine

32 + 33

[0457] In some examples of any of the ABPCs described herein, the first antigen-binding domain comprises a light chain variable domain comprising SEQ ID NO: 367, and a heavy chain variable domain that is at least 90% identical (e.g., at least 92%, at least 94%, at least 96%, at least 98%, at least 99%, or 100%) identical to SEQ ID NO: 366, where the heavy chain variable domain includes a histidine at any of the specific combinations of one or more (e.g., two, three, four, five, six, seven, eight, nine, or ten) amino acid positions in SEQ ID NO: 366 listed in Table 7.

[0458] In some examples of any of the ABPCs described herein, the first antigen-binding domain comprises a heavy chain variable domain that is at least 90% identical to SEQ ID NO: 366, wherein the heavy chain variable domain includes a histidine at position 32 in SEQ ID NO: 366; and a light chain variable domain that is at least 90% (e.g., at least 92%, at least 94%, at least 96%, at least 98%, at least 99%, or 100%) identical to SEQ ID NO: 367.

[0459] In some examples of any of the ABPCs described herein, the first antigen-binding domain comprises a heavy chain variable domain that is at least 90% identical to SEQ ID NO: 366, wherein the heavy chain variable domain includes a histidine at position 33 in SEQ ID NO: 366; and a light chain variable domain that is at least 90% (e.g., at least 92%, at least 94%, at least 96%, at least 98%, at least 99%, or 100%) identical to SEQ ID NO: 367.

[0460] In some examples of any of the ABPCs described herein, the first antigen-binding domain includes a heavy chain variable domain of ADCT-602 with one or more (e.g., one, two, three, four, five, six, seven, eight, nine, ten, eleven, twelve, thirteen, fourteen, fifteen, sixteen, seventeen, eighteen, nineteen, or twenty) histidine(s) substituted with an alanine. In some examples of any of the ABPCs described herein, the first antigen-binding domain includes a light chain variable domain of ADCT-602 with one or more (e.g., one, two, three, four, five, six, seven, eight, nine, ten, eleven, twelve, thirteen, fourteen, fifteen, sixteen, seventeen, eighteen, nineteen, or twenty) histidine(s) substituted with an alanine. In some examples of any of the ABPCs described herein, the first antigen-binding domain includes a heavy chain variable domain of ADCT-602 with one or more (e.g., one, two, three, four, five, six, seven, eight, nine, ten, eleven, twelve, thirteen, fourteen, fifteen, sixteen, seventeen, eighteen, nineteen, or twenty) histidines substituted with an alanine; and a light chain variable domain of ADCT-602 with one or more (e.g., one, two, three, four, five, six, seven, eight, nine, ten, eleven, twelve, thirteen, fourteen, fifteen, sixteen, seventeen, eighteen, nineteen, or twenty) histidine(s) substituted with an alanine. In some examples of any of the ABPCs described herein, the heavy chain variable domain of ADCT-602 comprises SEQ ID NO: 366. In some examples of any of the ABPCs described herein, the light chain variable domain of ADCT-602 comprises SEQ ID NO: 367.

[0461] In some examples of any of the ABPCs described herein, the first antigen-binding domain comprises a heavy chain variable domain comprising a CDR1, a CDR2, and a CDR3 of SEQ ID NO: 368, SEQ ID NO: 369, and SEQ ID NO: 370, respectively, with collectively a total of one or more (e.g., one, two, three, four, five, six, seven, eight, nine, or ten) histidine(s) in SEQ ID NOs: 368-370 substituted with an alanine. In some examples of any of the ABPCs described herein, the first antigen-binding domain comprises a light chain variable domain comprising a CDR1, a CDR2, and a CDR3 of SEQ ID NO: 371, SEQ ID NO: 372, and SEQ ID NO: 373, respectively, with collectively a total of one or more (e.g., one, two, three, four, five, six, seven, eight, nine, or ten) histidine(s) in SEQ ID NOs: 371-373 substituted with an alanine. In some examples of any of the ABPCs described herein, the first antigen-binding domain includes: a heavy chain variable domain comprising a CDR1, a CDR2, and a CDR3 of SEQ ID NO: 368, SEQ ID NO: 369, and SEQ ID NO: 370, respectively, with collectively a total of one or more (e.g., one, two, three, four, five, six, seven, eight, nine, or ten) histidine(s) in SEQ ID NOs: 368-370 substituted with an alanine; and a light chain variable domain comprising a CDR1, a CDR2, and a CDR3 of SEQ ID NO: 371, SEQ ID NO: 372, and SEQ ID NO: 373, respectively, with collectively a total of one or more (e.g., one, two, three, four, five, six, seven, eight, nine, or ten) histidine(s) in SEQ ID NOs: 371-373 substituted with an alanine.

[0462] In some examples of any of the ABPCs described herein, the first antigen-binding domain comprises a heavy chain variable domain of SEQ ID NO: 366, SEQ ID NO: 374, SEQ ID NO: 375, SEQ ID NO: 376, SEQ ID NO: 377, SEQ ID NO: 378, SEQ ID NO: 379, SEQ ID NO: 380, SEQ ID NO: 381, SEQ ID NO: 382, SEQ ID NO: 383, SEQ ID NO: 384, SEQ ID NO: 385, SEQ ID NO: 386, SEQ ID NO: 387, SEQ ID NO: 388, SEQ ID NO: 389, SEQ ID NO: 390, SEQ ID NO: 391, SEQ ID NO: 392, SEQ ID NO: 393, SEQ ID NO: 394, SEQ ID NO: 395, SEQ ID NO: 396, SEQ ID NO: 397, SEQ ID NO: 398, SEQ ID NO: 399, SEQ ID NO: 400, SEQ ID NO: 401, SEQ ID NO: 402, SEQ ID NO: 403, SEQ ID NO: 404, SEQ ID NO: 405, SEQ ID NO: 406, SEQ ID NO: 407, SEQ ID NO: 408, or SEQ ID NO: 409.

[0463] In some examples of any of the ABPCs described herein, the first antigen-binding domain includes a light chain variable domain of SEQ ID NO: 367.

[0464] In some examples of any of the ABPCs described herein, the first antigen-binding domain includes a light chain variable domain comprising SEQ ID NO: 367, and a heavy chain variable domain comprising: SEQ ID NO: 374, SEQ ID NO: 375, SEQ ID NO: 376, SEQ ID NO: 377, SEQ ID NO: 378, SEQ ID NO: 379, SEQ ID NO: 380, SEQ ID NO: 381, SEQ ID NO: 382, SEQ ID NO: 383, SEQ ID NO: 384, SEQ ID NO: 385, SEQ ID NO: 386, SEQ ID NO: 387, SEQ ID NO: 388, SEQ ID NO: 389, SEQ ID NO: 390, SEQ ID NO: 391, SEQ ID NO: 392, SEQ ID NO: 393, SEQ ID NO: 394, SEQ ID NO: 395, SEQ ID NO: 396, SEQ ID NO: 397, SEQ ID NO: 398, SEQ ID NO: 399, SEQ ID NO: 400, SEQ ID NO: 401, SEQ ID NO: 402, SEQ ID NO: 403, SEQ ID NO: 404, SEQ ID NO: 405, SEQ ID NO: 406, SEQ ID NO: 407, SEQ ID NO: 408, or SEQ ID NO: 409.

[0465] In some examples of any of the ABPCs described herein, the first antigen-binding domain includes a heavy chain variable domain of 12C5 with one or more (e.g., one, two, three, four, five, six, seven, eight, nine, ten, eleven, twelve, thirteen, fourteen, fifteen, sixteen, seventeen, eighteen, nineteen, or twenty) amino acids substituted with a histidine. In some examples of any of the ABPCs described herein, the first antigen-binding domain includes a light chain variable domain of 12C5 with one or more (e.g., one, two, three, four, five, six, seven, eight, nine, ten, eleven, twelve, thirteen, fourteen, fifteen, sixteen, seventeen, eighteen, nineteen, or twenty) amino acids substituted with a histidine. In some examples of any of the ABPCs described herein, the first antigen-binding domain includes a heavy chain variable domain of 12C5 with one or more (e.g., one, two, three, four, five, six, seven, eight, nine, ten, eleven, twelve, thirteen, fourteen, fifteen, sixteen, seventeen, eighteen, nineteen, or twenty) amino acids substituted with a histidine; and a light chain variable domain of 12C5 with one or more (e.g., one, two, three, four, five, six, seven, eight, nine, ten, eleven, twelve, thirteen, fourteen, fifteen, sixteen, seventeen, eighteen, nineteen, or twenty) amino acids substituted with a histidine. In some examples of any of the ABPCs described herein, the heavy chain variable domain of 12C5 comprises SEQ ID NO: 410. In some examples of any of the ABPCs described herein, the light chain variable domain of 12C5 comprises SEQ ID NO: 411.

[0466] In some examples of any of the ABPCs described herein, the first antigen-binding domain comprises a heavy chain variable domain comprising a CDR1, a CDR2, and a CDR3 of SEQ ID NO: 412, SEQ ID NO: 413, and SEQ ID NO: 414, respectively, with collectively a total of one or more (e.g., one, two, three, four, five, six, seven, eight, nine, or ten) amino acid positions in SEQ ID NOs: 412-414 substituted with a histidine. In some examples of any of the ABPCs described herein, the first antigen-binding domain comprises a light chain variable domain comprising a CDR1, a CDR2, and a CDR3 of SEQ ID NO: 415, SEQ ID NO: 416, and SEQ ID NO: 417, respectively, with collectively a total of one or more (e.g., one, two, three, four, five, six, seven, eight, nine, or ten) amino acid positions in SEQ ID NOs: 415-417 substituted with a histidine. In some examples of any of the ABPCs described herein, the first antigen-binding domain includes: a heavy chain variable domain comprising a CDR1, a CDR2, and a CDR3 of SEQ ID NO: 412, SEQ ID NO: 413, and SEQ ID NO: 414, respectively, with collectively a total of one or more (e.g., one, two, three, four, five, six, seven, eight, nine, or ten) amino acid positions in SEQ ID NOs: 412-414 substituted with a histidine; and a light chain variable domain comprising a CDR1, a CDR2, and a CDR3 of SEQ ID NO: 415, SEQ ID NO: 416, and SEQ ID NO: 417, respectively, with collectively a total of one or more (e.g., one, two, three, four, five, six, seven, eight, nine, or ten) amino acid positions in SEQ ID NOs: 415-417 substituted with a histidine.

[0467] In some examples of any of the ABPCs described herein, the first antigen-binding domain includes a heavy chain variable domain that is at least 90% (e.g., at least 92%, at least 94%, at least 96%, at least 98%, at least 99%, or 100%) identical to SEQ ID NO: 410, where the heavy chain variable domain includes a histidine at one or more (e.g., one, two, three, four, five, six, seven, eight, nine, ten, eleven, twelve, thirteen, fourteen, fifteen, sixteen, seventeen, eighteen, nineteen, or twenty) amino acid positions in SEQ ID NO: 410 selected from the group consisting of: 27, 29, 32, 50, 52, 53, 54, 55, 58, 59, 99, 100, 102, 103, and 107. In some examples of any of the ABPCs described herein, the first antigen-binding domain includes a light chain variable domain that is at least 90% (e.g., at least 92%, at least 94%, at least 96%, at least 98%, at least 99%, or 100%) identical to SEQ ID NO: 411, where the light chain variable domain includes a histidine at one or more (e.g., one, two, three, four, five, six, seven, eight, nine, ten, eleven, twelve, thirteen, fourteen, fifteen, sixteen, seventeen, eighteen, nineteen, or twenty) amino acid positions in SEQ ID NO: 411 selected from the group consisting of: 24, 28, 29, 30, 34, 35, 52, 53, 57, 91, 92, 93, and 99. In some examples of any of the ABPCs described herein the first antigen-binding domain includes: a heavy chain variable domain that is at least 90% (e.g., at least 92%, at least 94%, at least 96%, at least 98%, at least 99%, or 100%) identical to SEQ ID NO: 410, where the heavy chain variable domain includes a histidine at one or more (e.g., one, two, three, four, five, six, seven, eight, nine, ten, eleven, twelve, thirteen, fourteen, fifteen, sixteen, seventeen, eighteen, nineteen, or twenty) amino acid positions in SEQ ID NO: 410 selected from the group consisting of: 27, 29, 32, 50, 52, 53, 54, 55, 58, 59, 99, 100, 102, 103, and 107, and a light chain variable domain that is at least 90% (e.g., at least 92%, at least 94%, at least 96%, at least 98%, at least 99%, or 100%) identical to SEQ ID NO: 411, where the light chain variable domain includes a histidine at one or more (e.g., one, two, three, four, five, six, seven, eight, nine, ten, eleven, twelve, thirteen, fourteen, fifteen, sixteen, seventeen, eighteen, nineteen, or twenty) amino acid positions in SEQ ID NO: 411 selected from the group consisting of: 24, 28, 29, 30, 34, 35, 52, 53, 57, 91, 92, 93, and 99.

[0468] In some examples of any of the ABPCs described herein, a heavy chain variable domain includes a heavy chain variable domain that is at least 90% (e.g., at least 92%, at least 94%, at least 96%, at least 98%, at least 99%, or 100%) identical to SEQ ID NO: 410, where the heavy chain variable domain includes a histidine at any of the specific combinations of one or more amino acid positions in SEQ ID NO: 410 listed in Table 8.

TABLE 8
Exemplary Combinations of Amino Acid Positions in SEQ
ID NO: 410 that can be Substituted with Histidine

27 + 29, 27 + 32, 27 + 50, 27 + 52, 27 + 53, 27 + 54, 27 + 55, 27 + 58, 27 + 59, 27 + 99, 27 +
100, 27 + 102, 27 + 103, 27 + 107, 29 + 32, 29 + 50, 29 + 52, 29 + 53, 29 + 54, 29 + 55,
29 + 58, 29 + 59, 29 + 99, 29 + 100, 29 + 102, 29 + 103, 29 + 107, 32 + 50, 32 + 52, 32 +
53, 32 + 54, 32 + 55, 32 + 58, 32 + 59, 32 + 99, 32 + 100, 32 + 102, 32 + 103, 32 + 107, 50 +
52, 50 + 53, 50 + 54, 50 + 55, 50 + 58, 50 + 59, 50 + 99, 50 + 100, 50 + 102, 50 + 103,
50 + 107, 52 + 53, 52 + 54, 52 + 55, 52 + 58, 52 + 59, 52 + 99, 52 + 100, 52 + 102, 52 +
103, 52 + 107, 53 + 54, 53 + 55, 53 + 58, 53 + 59, 53 + 99, 53 + 100, 53 + 102, 53 + 103,
53 + 107, 54 + 55, 54 + 58, 54 + 59, 54 + 99, 54 + 100, 54 + 102, 54 + 103, 54 + 107, 55 +
58, 55 + 59, 55 + 99, 55 + 100, 55 + 102, 55 + 103, 55 + 107, 58 + 59, 58 + 99, 58 + 100,
58 + 102, 58 + 103, 58 + 107, 59 + 99, 59 + 100, 59 + 102, 59 + 103, 59 + 107, 99 + 100,
99 + 102, 99 + 103, 99 + 107, 100 + 102, 100 + 103, 100 + 107, 102 + 103, 102 + 107, 103 +
107, 27 + 29 + 32, 27 + 29 + 50, 27 + 29 + 52, 27 + 29 + 53, 27 + 29 + 54, 27 + 29 + 55,
27 + 29 + 58, 27 + 29 + 59, 27 + 29 + 99, 27 + 29 + 100, 27 + 29 + 102, 27 + 29 + 103, 27 +
29 + 107, 27 + 32 + 50, 27 + 32 + 52, 27 + 32 + 53, 27 + 32 + 54, 27 + 32 + 55, 27 + 32 +
58, 27 + 32 + 59, 27 + 32 + 99, 27 + 32 + 100, 27 + 32 + 102, 27 + 32 + 103, 27 + 32 +
107, 27 + 50 + 52, 27 + 50 + 53, 27 + 50 + 54, 27 + 50 + 55, 27 + 50 + 58, 27 + 50 + 59,
27 + 50 + 99, 27 + 50 + 100, 27 + 50 + 102, 27 + 50 + 103, 27 + 50 + 107, 27 + 52 + 53,
27 + 52 + 54, 27 + 52 + 55, 27 + 52 + 58, 27 + 52 + 59, 27 + 52 + 99, 27 + 52 + 100, 27 +
52 + 102, 27 + 52 + 103, 27 + 52 + 107, 27 + 53 + 54, 27 + 53 + 55, 27 + 53 + 58, 27 + 53 +
59, 27 + 53 + 99, 27 + 53 + 100, 27 + 53 + 102, 27 + 53 + 103, 27 + 53 + 107, 27 + 54 +
55, 27 + 54 + 58, 27 + 54 + 59, 27 + 54 + 99, 27 + 54 + 100, 27 + 54 + 102, 27 + 54 + 103,
27 + 54 + 107, 27 + 55 + 58, 27 + 55 + 59, 27 + 55 + 99, 27 + 55 + 100, 27 + 55 + 102, 27 +
55 + 103, 27 + 55 + 107, 27 + 58 + 59, 27 + 58 + 99, 27 + 58 + 100, 27 + 58 + 102, 27 +
58 + 103, 27 + 58 + 107, 27 + 59 + 99, 27 + 59 + 100, 27 + 59 + 102, 27 + 59 + 103, 27 +
59 + 107, 27 + 99 + 100, 27 + 99 + 102, 27 + 99 + 103, 27 + 99 + 107, 27 + 100 + 102, 27 +
100 + 103, 27 + 100 + 107, 27 + 102 + 103, 27 + 102 + 107, 27 + 103 + 107, 29 + 32 +
50, 29 + 32 + 52, 29 + 32 + 53, 29 + 32 + 54, 29 + 32 + 55, 29 + 32 + 58, 29 + 32 + 59, 29 +
32 + 99, 29 + 32 + 100, 29 + 32 + 102, 29 + 32 + 103, 29 + 32 + 107, 29 + 50 + 52, 29 +
50 + 53, 29 + 50 + 54, 29 + 50 + 55, 29 + 50 + 58, 29 + 50 + 59, 29 + 50 + 99, 29 + 50 +
100, 29 + 50 + 102, 29 + 50 + 103, 29 + 50 + 107, 29 + 52 + 53, 29 + 52 + 54, 29 + 52 +
55, 29 + 52 + 58, 29 + 52 + 59, 29 + 52 + 99, 29 + 52 + 100, 29 + 52 + 102, 29 + 52 + 103,
29 + 52 + 107, 29 + 53 + 54, 29 + 53 + 55, 29 + 53 + 58, 29 + 53 + 59, 29 + 53 + 99, 29 +
53 + 100, 29 + 53 + 102, 29 + 53 + 103, 29 + 53 + 107, 29 + 54 + 55, 29 + 54 + 58, 29 +
54 + 59, 29 + 54 + 99, 29 + 54 + 100, 29 + 54 + 102, 29 + 54 + 103, 29 + 54 + 107, 29 +
55 + 58, 29 + 55 + 59, 29 + 55 + 99, 29 + 55 + 100, 29 + 55 + 102, 29 + 55 + 103, 29 + 55 +
107, 29 + 58 + 59, 29 + 58 + 99, 29 + 58 + 100, 29 + 58 + 102, 29 + 58 + 103, 29 + 58 +
107, 29 + 59 + 99, 29 + 59 + 100, 29 + 59 + 102, 29 + 59 + 103, 29 + 59 + 107, 29 + 99 +
100, 29 + 99 + 102, 29 + 99 + 103, 29 + 99 + 107, 29 + 100 + 102, 29 + 100 + 103, 29 +
100 + 107, 29 + 102 + 103, 29 + 102 + 107, 29 + 103 + 107, 32 + 50 + 52, 32 + 50 + 53,
32 + 50 + 54, 32 + 50 + 55, 32 + 50 + 58, 32 + 50 + 59, 32 + 50 + 99, 32 + 50 + 100, 32 +
50 + 102, 32 + 50 + 103, 32 + 50 + 107, 32 + 52 + 53, 32 + 52 + 54, 32 + 52 + 55, 32 + 52 +
58, 32 + 52 + 59, 32 + 52 + 99, 32 + 52 + 100, 32 + 52 + 102, 32 + 52 + 103, 32 + 52 +
107, 32 + 53 + 54, 32 + 53 + 55, 32 + 53 + 58, 32 + 53 + 59, 32 + 53 + 99, 32 + 53 + 100,
32 + 53 + 102, 32 + 53 + 103, 32 + 53 + 107, 32 + 54 + 55, 32 + 54 + 58, 32 + 54 + 59, 32 +
54 + 99, 32 + 54 + 100, 32 + 54 + 102, 32 + 54 + 103, 32 + 54 + 107, 32 + 55 + 58, 32 +
55 + 59, 32 + 55 + 99, 32 + 55 + 100, 32 + 55 + 102, 32 + 55 + 103, 32 + 55 + 107, 32 +
58 + 59, 32 + 58 + 99, 32 + 58 + 100, 32 + 58 + 102, 32 + 58 + 103, 32 + 58 + 107, 32 +
59 + 99, 32 + 59 + 100, 32 + 59 + 102, 32 + 59 + 103, 32 + 59 + 107, 32 + 99 + 100, 32 +
99 + 102, 32 + 99 + 103, 32 + 99 + 107, 32 + 100 + 102, 32 + 100 + 103, 32 + 100 + 107,
32 + 102 + 103, 32 + 102 + 107, 32 + 103 + 107, 50 + 52 + 53, 50 + 52 + 54, 50 + 52 + 55,
50 + 52 + 58, 50 + 52 + 59, 50 + 52 + 99, 50 + 52 + 100, 50 + 52 + 102, 50 + 52 + 103, 50 +
52 + 107, 50 + 53 + 54, 50 + 53 + 55, 50 + 53 + 58, 50 + 53 + 59, 50 + 53 + 99, 50 + 53 +
100, 50 + 53 + 102, 50 + 53 + 103, 50 + 53 + 107, 50 + 54 + 55, 50 + 54 + 58, 50 + 54 +
59, 50 + 54 + 99, 50 + 54 + 100, 50 + 54 + 102, 50 + 54 + 103, 50 + 54 + 107, 50 + 55 +
58, 50 + 55 + 59, 50 + 55 + 99, 50 + 55 + 100, 50 + 55 + 102, 50 + 55 + 103, 50 + 55 +
107, 50 + 58 + 59, 50 + 58 + 99, 50 + 58 + 100, 50 + 58 + 102, 50 + 58 + 103, 50 + 58 +
107, 50 + 59 + 99, 50 + 59 + 100, 50 + 59 + 102, 50 + 59 + 103, 50 + 59 + 107, 50 + 99 +
100, 50 + 99 + 102, 50 + 99 + 103, 50 + 99 + 107, 50 + 100 + 102, 50 + 100 + 103, 50 +
100 + 107, 50 + 102 + 103, 50 + 102 + 107, 50 + 103 + 107, 52 + 53 + 54, 52 + 53 + 55,
52 + 53 + 58, 52 + 53 + 59, 52 + 53 + 99, 52 + 53 + 100, 52 + 53 + 102, 52 + 53 + 103, 52 +
53 + 107, 52 + 54 + 55, 52 + 54 + 58, 52 + 54 + 59, 52 + 54 + 99, 52 + 54 + 100, 52 + 54 +
102, 52 + 54 + 103, 52 + 54 + 107, 52 + 55 + 58, 52 + 55 + 59, 52 + 55 + 99, 52 + 55 +
100, 52 + 55 + 102, 52 + 55 + 103, 52 + 55 + 107, 52 + 58 + 59, 52 + 58 + 99, 52 + 58 +
100, 52 + 58 + 102, 52 + 58 + 103, 52 + 58 + 107, 52 + 59 + 99, 52 + 59 + 100, 52 + 59 +
102, 52 + 59 + 103, 52 + 59 + 107, 52 + 99 + 100, 52 + 99 + 102, 52 + 99 + 103, 52 + 99 +
107, 52 + 100 + 102, 52 + 100 + 103, 52 + 100 + 107, 52 + 102 + 103, 52 + 102 + 107, 52 +
103 + 107, 53 + 54 + 55, 53 + 54 + 58, 53 + 54 + 59, 53 + 54 + 99, 53 + 54 + 100, 53 +
54 + 102, 53 + 54 + 103, 53 + 54 + 107, 53 + 55 + 58, 53 + 55 + 59, 53 + 55 + 99, 53 + 55 +
100, 53 + 55 + 102, 53 + 55 + 103, 53 + 55 + 107, 53 + 58 + 59, 53 + 58 + 99, 53 + 58 +
100, 53 + 58 + 102, 53 + 58 + 103, 53 + 58 + 107, 53 + 59 + 99, 53 + 59 + 100, 53 + 59 +
102, 53 + 59 + 103, 53 + 59 + 107, 53 + 99 + 100, 53 + 99 + 102, 53 + 99 + 103, 53 + 99 +
107, 53 + 100 + 102, 53 + 100 + 103, 53 + 100 + 107, 53 + 102 + 103, 53 + 102 + 107, 53 +
103 + 107, 54 + 55 + 58, 54 + 55 + 59, 54 + 55 + 99, 54 + 55 + 100, 54 + 55 + 102, 54 +
55 + 103, 54 + 55 + 107, 54 + 58 + 59, 54 + 58 + 99, 54 + 58 + 100, 54 + 58 + 102, 54 +
58 + 103, 54 + 58 + 107, 54 + 59 + 99, 54 + 59 + 100, 54 + 59 + 102, 54 + 59 + 103, 54 +
59 + 107, 54 + 99 + 100, 54 + 99 + 102, 54 + 99 + 103, 54 + 99 + 107, 54 + 100 + 102, 54 +
100 + 103, 54 + 100 + 107, 54 + 102 + 103, 54 + 102 + 107, 54 + 103 + 107, 55 + 58 +
59, 55 + 58 + 99, 55 + 58 + 100, 55 + 58 + 102, 55 + 58 + 103, 55 + 58 + 107, 55 + 59 +
99, 55 + 59 + 100, 55 + 59 + 102, 55 + 59 + 103, 55 + 59 + 107, 55 + 99 + 100, 55 + 99 +
102, 55 + 99 + 103, 55 + 99 + 107, 55 + 100 + 102, 55 + 100 + 103, 55 + 100 + 107, 55 +
102 + 103, 55 + 102 + 107, 55 + 103 + 107, 58 + 59 + 99, 58 + 59 + 100, 58 + 59 + 102,
58 + 59 + 103, 58 + 59 + 107, 58 + 99 + 100, 58 + 99 + 102, 58 + 99 + 103, 58 + 99 + 107,
58 + 100 + 102, 58 + 100 + 103, 58 + 100 + 107, 58 + 102 + 103, 58 + 102 + 107, 58 +
103 + 107, 59 + 99 + 100, 59 + 99 + 102, 59 + 99 + 103, 59 + 99 + 107, 59 + 100 + 102,
59 + 100 + 103, 59 + 100 + 107, 59 + 102 + 103, 59 + 102 + 107, 59 + 103 + 107, 99 +
100 + 102, 99 + 100 + 103, 99 + 100 + 107, 99 + 102 + 103, 99 + 102 + 107, 99 + 103 +
107, 100 + 102 + 103, 100 + 102 + 107, 100 + 103 + 107, 102 + 103 + 107

[0469] In some examples of any of the ABPCs described herein, a light chain variable domain includes a light chain variable domain that is at least 90% (e.g., at least 92%, at least 94%, at least 96%, at least 98%, at least 99%, or 100%) identical to SEQ ID NO: 411, where the light chain variable domain includes a histidine at any of the specific combinations of one or more amino acid positions in SEQ ID NO: 411 listed in Table 9.

TABLE 9
Exemplary Combinations of Amino Acid Positions in SEQ
ID NO: 411 that can be Substituted with Histidine

24 + 28, 24 + 29, 24 + 30, 24 + 34, 24 + 35, 24 + 52, 24 + 53, 24 + 57, 24 + 91, 24 + 92, 24 +
93, 24 + 99, 28 + 29, 28 + 30, 28 + 34, 28 + 35, 28 + 52, 28 + 53, 28 + 57, 28 + 91, 28 +
92, 28 + 93, 28 + 99, 29 + 30, 29 + 34, 29 + 35, 29 + 52, 29 + 53, 29 + 57, 29 + 91, 29 +
92, 29 + 93, 29 + 99, 30 + 34, 30 + 35, 30 + 52, 30 + 53, 30 + 57, 30 + 91, 30 + 92, 30 +
93, 30 + 99, 34 + 35, 34 + 52, 34 + 53, 34 + 57, 34 + 91, 34 + 92, 34 + 93, 34 + 99, 35 +
52, 35 + 53, 35 + 57, 35 + 91, 35 + 92, 35 + 93, 35 + 99, 52 + 53, 52 + 57, 52 + 91, 52 +
92, 52 + 93, 52 + 99, 53 + 57, 53 + 91, 53 + 92, 53 + 93, 53 + 99, 57 + 91, 57 + 92, 57 +
93, 57 + 99, 91 + 92, 91 + 93, 91 + 99, 92 + 93, 92 + 99, 93 + 99, 24 + 28 + 29, 24 + 28 +
30, 24 + 28 + 34, 24 + 28 + 35, 24 + 28 + 52, 24 + 28 + 53, 24 + 28 + 57, 24 + 28 + 91, 24 +
28 + 92, 24 + 28 + 93, 24 + 28 + 99, 24 + 29 + 30, 24 + 29 + 34, 24 + 29 + 35, 24 + 29 +
52, 24 + 29 + 53, 24 + 29 + 57, 24 + 29 + 91, 24 + 29 + 92, 24 + 29 + 93, 24 + 29 + 99, 24 +
30 + 34, 24 + 30 + 35, 24 + 30 + 52, 24 + 30 + 53, 24 + 30 + 57, 24 + 30 + 91, 24 + 30 +
92, 24 + 30 + 93, 24 + 30 + 99, 24 + 34 + 35, 24 + 34 + 52, 24 + 34 + 53, 24 + 34 + 57, 24 +
34 + 91, 24 + 34 + 92, 24 + 34 + 93, 24 + 34 + 99, 24 + 35 + 52, 24 + 35 + 53, 24 + 35 +
57, 24 + 35 + 91, 24 + 35 + 92, 24 + 35 + 93, 24 + 35 + 99, 24 + 52 + 53, 24 + 52 + 57, 24 +
52 + 91, 24 + 52 + 92, 24 + 52 + 93, 24 + 52 + 99, 24 + 53 + 57, 24 + 53 + 91, 24 + 53 +
92, 24 + 53 + 93, 24 + 53 + 99, 24 + 57 + 91, 24 + 57 + 92, 24 + 57 + 93, 24 + 57 + 99, 24 +
91 + 92, 24 + 91 + 93, 24 + 91 + 99, 24 + 92 + 93, 24 + 92 + 99, 24 + 93 + 99, 28 + 29 +
30, 28 + 29 + 34, 28 + 29 + 35, 28 + 29 + 52, 28 + 29 + 53, 28 + 29 + 57, 28 + 29 + 91, 28 +
29 + 92, 28 + 29 + 93, 28 + 29 + 99, 28 + 30 + 34, 28 + 30 + 35, 28 + 30 + 52, 28 + 30 +
53, 28 + 30 + 57, 28 + 30 + 91, 28 + 30 + 92, 28 + 30 + 93, 28 + 30 + 99, 28 + 34 + 35, 28 +
34 + 52, 28 + 34 + 53, 28 + 34 + 57, 28 + 34 + 91, 28 + 34 + 92, 28 + 34 + 93, 28 + 34 +
99, 28 + 35 + 52, 28 + 35 + 53, 28 + 35 + 57, 28 + 35 + 91, 28 + 35 + 92, 28 + 35 + 93, 28 +
35 + 99, 28 + 52 + 53, 28 + 52 + 57, 28 + 52 + 91, 28 + 52 + 92, 28 + 52 + 93, 28 + 52 +
99, 28 + 53 + 57, 28 + 53 + 91, 28 + 53 + 92, 28 + 53 + 93, 28 + 53 + 99, 28 + 57 + 91, 28 +
57 + 92, 28 + 57 + 93, 28 + 57 + 99, 28 + 91 + 92, 28 + 91 + 93, 28 + 91 + 99, 28 + 92 +
93, 28 + 92 + 99, 28 + 93 + 99, 29 + 30 + 34, 29 + 30 + 35, 29 + 30 + 52, 29 + 30 + 53, 29 +
30 + 57, 29 + 30 + 91, 29 + 30 + 92, 29 + 30 + 93, 29 + 30 + 99, 29 + 34 + 35, 29 + 34 +
52, 29 + 34 + 53, 29 + 34 + 57, 29 + 34 + 91, 29 + 34 + 92, 29 + 34 + 93, 29 + 34 + 99, 29 +
35 + 52, 29 + 35 + 53, 29 + 35 + 57, 29 + 35 + 91, 29 + 35 + 92, 29 + 35 + 93, 29 + 35 +
99, 29 + 52 + 53, 29 + 52 + 57, 29 + 52 + 91, 29 + 52 + 92, 29 + 52 + 93, 29 + 52 + 99, 29 +
53 + 57, 29 + 53 + 91, 29 + 53 + 92, 29 + 53 + 93, 29 + 53 + 99, 29 + 57 + 91, 29 + 57 +
92, 29 + 57 + 93, 29 + 57 + 99, 29 + 91 + 92, 29 + 91 + 93, 29 + 91 + 99, 29 + 92 + 93, 29 +
92 + 99, 29 + 93 + 99, 30 + 34 + 35, 30 + 34 + 52, 30 + 34 + 53, 30 + 34 + 57, 30 + 34 +
91, 30 + 34 + 92, 30 + 34 + 93, 30 + 34 + 99, 30 + 35 + 52, 30 + 35 + 53, 30 + 35 + 57, 30 +
35 + 91, 30 + 35 + 92, 30 + 35 + 93, 30 + 35 + 99, 30 + 52 + 53, 30 + 52 + 57, 30 + 52 +
91, 30 + 52 + 92, 30 + 52 + 93, 30 + 52 + 99, 30 + 53 + 57, 30 + 53 + 91, 30 + 53 + 92, 30 +
53 + 93, 30 + 53 + 99, 30 + 57 + 91, 30 + 57 + 92, 30 + 57 + 93, 30 + 57 + 99, 30 + 91 +
92, 30 + 91 + 93, 30 + 91 + 99, 30 + 92 + 93, 30 + 92 + 99, 30 + 93 + 99, 34 + 35 + 52, 34 +
35 + 53, 34 + 35 + 57, 34 + 35 + 91, 34 + 35 + 92, 34 + 35 + 93, 34 + 35 + 99, 34 + 52 +
53, 34 + 52 + 57, 34 + 52 + 91, 34 + 52 + 92, 34 + 52 + 93, 34 + 52 + 99, 34 + 53 + 57, 34 +
53 + 91, 34 + 53 + 92, 34 + 53 + 93, 34 + 53 + 99, 34 + 57 + 91, 34 + 57 + 92, 34 + 57 +
93, 34 + 57 + 99, 34 + 91 + 92, 34 + 91 + 93, 34 + 91 + 99, 34 + 92 + 93, 34 + 92 + 99, 34 +
93 + 99, 35 + 52 + 53, 35 + 52 + 57, 35 + 52 + 91, 35 + 52 + 92, 35 + 52 + 93, 35 + 52 +
99, 35 + 53 + 57, 35 + 53 + 91, 35 + 53 + 92, 35 + 53 + 93, 35 + 53 + 99, 35 + 57 + 91, 35 +
57 + 92, 35 + 57 + 93, 35 + 57 + 99, 35 + 91 + 92, 35 + 91 + 93, 35 + 91 + 99, 35 + 92 +
93, 35 + 92 + 99, 35 + 93 + 99, 52 + 53 + 57, 52 + 53 + 91, 52 + 53 + 92, 52 + 53 + 93, 52 +
53 + 99, 52 + 57 + 91, 52 + 57 + 92, 52 + 57 + 93, 52 + 57 + 99, 52 + 91 + 92, 52 + 91 +
93, 52 + 91 + 99, 52 + 92 + 93, 52 + 92 + 99, 52 + 93 + 99, 53 + 57 + 91, 53 + 57 + 92, 53 +
57 + 93, 53 + 57 + 99, 53 + 91 + 92, 53 + 91 + 93, 53 + 91 + 99, 53 + 92 + 93, 53 + 92 +
99, 53 + 93 + 99, 57 + 91 + 92, 57 + 91 + 93, 57 + 91 + 99, 57 + 92 + 93, 57 + 92 + 99, 57 +
93 + 99, 91 + 92 + 93, 91 + 92 + 99, 91 + 93 + 99, 92 + 93 + 99

[0470] In some examples of any of the ABPCs described herein, the first antigen-binding domain includes a heavy chain variable domain that is at least 90% (e.g., at least 92%, at least 94%, at least 96%, at least 98%, at least 99%, or 100%) identical to SEQ ID NO: 410, where the heavy chain variable domain includes a histidine at any of the specific combinations of one or more amino acid positions in SEQ ID NO: 410 listed in Table 8; and a light chain variable domain that that is at least 90% (e.g., at least 92%, at least 94%, at least 96%, at least 98%, at least 99%, or 100%) identical to SEQ ID NO: 411, where the light chain variable domain includes a histidine at any of the specific combinations of one or more amino acid positions in SEQ ID NO: 411 listed in Table 9.

[0471] In some examples of any of the ABPCs described herein, the first antigen-binding domain comprises a light chain variable domain comprising SEQ ID NO: 411, and a heavy chain variable domain that is at least 90% identical (e.g., at least 92%, at least 94%, at least 96%, at least 98%, at least 99%, or 100%) identical to SEQ ID NO: 410, where the heavy chain variable domain includes a histidine at any of the specific combinations of one or more (e.g., two, three, four, five, six, seven, eight, nine, or ten) amino acid positions in SEQ ID NO: 410 listed in Table 8.

[0472] In some examples of any of the ABPCs described herein, the first antigen-binding domain comprises a light chain variable domain that is at least 90% identical to SEQ ID NO: 411, wherein the light chain variable domain includes a histidine at position 24 in SEQ ID NO: 411; and a heavy chain variable domain that is at least 90% (e.g., at least 92%, at least 94%, at least 96%, at least 98%, at least 99%, or 100%) identical to SEQ ID NO: 410, where the heavy chain variable domain includes a histidine at any of the specific combinations of one or more amino acid positions in SEQ ID NO: 410 listed in Table 8.

[0473] In some examples of any of the ABPCs described herein, the first antigen-binding domain comprises a light chain variable domain that is at least 90% identical to SEQ ID NO: 411, wherein the light chain variable domain includes a histidine at position 28 in SEQ ID NO: 411; and a heavy chain variable domain that is at least 90% (e.g., at least 92%, at least 94%, at least 96%, at least 98%, at least 99%, or 100%) identical to SEQ ID NO: 410, where the heavy chain variable domain includes a histidine at any of the specific combinations of one or more amino acid positions in SEQ ID NO: 410 listed in Table 8.

[0474] In some examples of any of the ABPCs described herein, the first antigen-binding domain comprises a light chain variable domain that is at least 90% identical to SEQ ID NO: 411, wherein the light chain variable domain includes a histidine at position 29 in SEQ ID NO: 411; and a heavy chain variable domain that is at least 90% (e.g., at least 92%, at least 94%, at least 96%, at least 98%, at least 99%, or 100%) identical to SEQ ID NO: 410, where the heavy chain variable domain includes a histidine at any of the specific combinations of one or more amino acid positions in SEQ ID NO: 410 listed in Table 8.

[0475] In some examples of any of the ABPCs described herein, the first antigen-binding domain comprises a light chain variable domain that is at least 90% identical to SEQ ID NO: 411, wherein the light chain variable domain includes a histidine at position 30 in SEQ ID NO: 411; and a heavy chain variable domain that is at least 90% (e.g., at least 92%, at least 94%, at least 96%, at least 98%, at least 99%, or 100%) identical to SEQ ID NO: 410, where the heavy chain variable domain includes a histidine at any of the specific combinations of one or more amino acid positions in SEQ ID NO: 410 listed in Table 8.

[0476] In some examples of any of the ABPCs described herein, the first antigen-binding domain comprises a light chain variable domain that is at least 90% identical to SEQ ID NO: 411, wherein the light chain variable domain includes a histidine at position 34 in SEQ ID NO: 411; and a heavy chain variable domain that is at least 90% (e.g., at least 92%, at least 94%, at least 96%, at least 98%, at least 99%, or 100%) identical to SEQ ID NO: 410, where the heavy chain variable domain includes a histidine at any of the specific combinations of one or more amino acid positions in SEQ ID NO: 410 listed in Table 8.

[0477] In some examples of any of the ABPCs described herein, the first antigen-binding domain comprises a light chain variable domain that is at least 90% identical to SEQ ID NO: 411, wherein the light chain variable domain includes a histidine at position 35 in SEQ ID NO: 411; and a heavy chain variable domain that is at least 90% (e.g., at least 92%, at least 94%, at least 96%, at least 98%, at least 99%, or 100%) identical to SEQ ID NO: 410, where the heavy chain variable domain includes a histidine at any of the specific combinations of one or more amino acid positions in SEQ ID NO: 410 listed in Table 8.

[0478] In some examples of any of the ABPCs described herein, the first antigen-binding domain comprises a light chain variable domain that is at least 90% identical to SEQ ID NO: 411, wherein the light chain variable domain includes a histidine at position 52 in SEQ ID NO: 411; and a heavy chain variable domain that is at least 90% (e.g., at least 92%, at least 94%, at least 96%, at least 98%, at least 99%, or 100%) identical to SEQ ID NO: 410, where the heavy chain variable domain includes a histidine at any of the specific combinations of one or more amino acid positions in SEQ ID NO: 410 listed in Table 8.

[0479] In some examples of any of the ABPCs described herein, the first antigen-binding domain comprises a light chain variable domain that is at least 90% identical to SEQ ID NO: 411, wherein the light chain variable domain includes a histidine at position 53 in SEQ ID NO: 411; and a heavy chain variable domain that is at least 90% (e.g., at least 92%, at least 94%, at least 96%, at least 98%, at least 99%, or 100%) identical to SEQ ID NO: 410, where the heavy chain variable domain includes a histidine at any of the specific combinations of one or more amino acid positions in SEQ ID NO: 410 listed in Table 8.

[0480] In some examples of any of the ABPCs described herein, the first antigen-binding domain comprises a light chain variable domain that is at least 90% identical to SEQ ID NO: 411, wherein the light chain variable domain includes a histidine at position 57 in SEQ ID NO: 411; and a heavy chain variable domain that is at least 90% (e.g., at least 92%, at least 94%, at least 96%, at least 98%, at least 99%, or 100%) identical to SEQ ID NO: 410, where the heavy chain variable domain includes a histidine at any of the specific combinations of one or more amino acid positions in SEQ ID NO: 410 listed in Table 8.

[0481] In some examples of any of the ABPCs described herein, the first antigen-binding domain comprises a light chain variable domain that is at least 90% identical to SEQ ID NO: 411, wherein the light chain variable domain includes a histidine at position 91 in SEQ ID NO: 411; and a heavy chain variable domain that is at least 90% (e.g., at least 92%, at least 94%, at least 96%, at least 98%, at least 99%, or 100%) identical to SEQ ID NO: 410, where the heavy chain variable domain includes a histidine at any of the specific combinations of one or more amino acid positions in SEQ ID NO: 410 listed in Table 8.

[0482] In some examples of any of the ABPCs described herein, the first antigen-binding domain comprises a light chain variable domain that is at least 90% identical to SEQ ID NO: 411, wherein the light chain variable domain includes a histidine at position 92 in SEQ ID NO: 411; and a heavy chain variable domain that is at least 90% (e.g., at least 92%, at least 94%, at least 96%, at least 98%, at least 99%, or 100%) identical to SEQ ID NO: 410, where the heavy chain variable domain includes a histidine at any of the specific combinations of one or more amino acid positions in SEQ ID NO: 410 listed in Table 8.

[0483] In some examples of any of the ABPCs described herein, the first antigen-binding domain comprises a light chain variable domain that is at least 90% identical to SEQ ID NO: 411, wherein the light chain variable domain includes a histidine at position 93 in SEQ ID NO: 411; and a heavy chain variable domain that is at least 90% (e.g., at least 92%, at least 94%, at least 96%, at least 98%, at least 99%, or 100%) identical to SEQ ID NO: 410, where the heavy chain variable domain includes a histidine at any of the specific combinations of one or more amino acid positions in SEQ ID NO: 410 listed in Table 8.

[0484] In some examples of any of the ABPCs described herein, the first antigen-binding domain comprises a light chain variable domain that is at least 90% identical to SEQ ID NO: 411, wherein the light chain variable domain includes a histidine at position 99 in SEQ ID NO: 411; and a heavy chain variable domain that is at least 90% (e.g., at least 92%, at least 94%, at least 96%, at least 98%, at least 99%, or 100%) identical to SEQ ID NO: 410, where the heavy chain variable domain includes a histidine at any of the specific combinations of one or more amino acid positions in SEQ ID NO: 410 listed in Table 8.

[0485] In some examples of any of the ABPCs described herein, the first antigen-binding domain includes a heavy chain variable domain of 12C5 with one or more (e.g., one, two, three, four, five, six, seven, eight, nine, ten, eleven, twelve, thirteen, fourteen, fifteen, sixteen, seventeen, eighteen, nineteen, or twenty) histidine(s) substituted with an alanine. In some examples of any of the ABPCs described herein, the first antigen-binding domain includes a light chain variable domain of 12C5 with one or more (e.g., one, two, three, four, five, six, seven, eight, nine, ten, eleven, twelve, thirteen, fourteen, fifteen, sixteen, seventeen, eighteen, nineteen, or twenty) histidine(s) substituted with an alanine. In some examples of any of the ABPCs described herein, the first antigen-binding domain includes a heavy chain variable domain of 12C5 with one or more (e.g., one, two, three, four, five, six, seven, eight, nine, ten, eleven, twelve, thirteen, fourteen, fifteen, sixteen, seventeen, eighteen, nineteen, or twenty) histidines substituted with an alanine; and a light chain variable domain of 12C5 with one or more (e.g., one, two, three, four, five, six, seven, eight, nine, ten, eleven, twelve, thirteen, fourteen, fifteen, sixteen, seventeen, eighteen, nineteen, or twenty) histidine(s) substituted with an alanine. In some examples of any of the ABPCs described herein, the heavy chain variable domain of 12C5 comprises SEQ ID NO: 410. In some examples of any of the ABPCs described herein, the light chain variable domain of 12C5 comprises SEQ ID NO: 411.

[0486] In some examples of any of the ABPCs described herein, the first antigen-binding domain comprises a heavy chain variable domain comprising a CDR1, a CDR2, and a CDR3 of SEQ ID NO: 412, SEQ ID NO: 413, and SEQ ID NO: 414, respectively, with collectively a total of one or more (e.g., one, two, three, four, five, six, seven, eight, nine, or ten) histidine(s) in SEQ ID NOs: 412-414 substituted with an alanine. In some examples of any of the ABPCs described herein, the first antigen-binding domain comprises a light chain variable domain comprising a CDR1, a CDR2, and a CDR3 of SEQ ID NO: 415, SEQ ID NO: 416, and SEQ ID NO: 417, respectively, with collectively a total of one or more (e.g., one, two, three, four, five, six, seven, eight, nine, or ten) histidine(s) in SEQ ID NOs: 415-417 substituted with an alanine. In some examples of any of the ABPCs described herein, the first antigen-binding domain includes: a heavy chain variable domain comprising a CDR1, a CDR2, and a CDR3 of SEQ ID NO: 412, SEQ ID NO: 413, and SEQ ID NO: 414, respectively, with collectively a total of one or more (e.g., one, two, three, four, five, six, seven, eight, nine, or ten) histidine(s) in SEQ ID NOs: 412-414 substituted with an alanine; and a light chain variable domain comprising a CDR1, a CDR2, and a CDR3 of SEQ ID NO: 415, SEQ ID NO: 416, and SEQ ID NO: 417, respectively, with collectively a total of one or more (e.g., one, two, three, four, five, six, seven, eight, nine, or ten) histidine(s) in SEQ ID NOs: 415-417 substituted with an alanine.

[0487] In some examples of any of the ABPCs described herein, the first antigen-binding domain comprises a heavy chain variable domain of SEQ ID NO: 410, SEQ ID NO: 418, SEQ ID NO: 419, SEQ ID NO: 420, SEQ ID NO: 421, SEQ ID NO: 422, SEQ ID NO: 423, SEQ ID NO: 424, SEQ ID NO: 425, SEQ ID NO: 426, SEQ ID NO: 427, SEQ ID NO: 428, SEQ ID NO: 429, SEQ ID NO: 430, SEQ ID NO: 431, SEQ ID NO: 432, SEQ ID NO: 433, SEQ ID NO: 434, SEQ ID NO: 435, SEQ ID NO: 436, SEQ ID NO: 437, SEQ ID NO: 438, SEQ ID NO: 439, SEQ ID NO: 440, SEQ ID NO: 441, SEQ ID NO: 442, SEQ ID NO: 443, SEQ ID NO: 444, SEQ ID NO: 445, SEQ ID NO: 446, SEQ ID NO: 447, SEQ ID NO: 448, SEQ ID NO: 449, SEQ ID NO: 450, SEQ ID NO: 451, SEQ ID NO: 452, SEQ ID NO: 453, SEQ ID NO: 454, SEQ ID NO: 455, SEQ ID NO: 456, or SEQ ID NO: 457.

[0488] In some examples of any of the ABPCs described herein, the first antigen-binding domain includes a light chain variable domain of SEQ ID NO: 411, SEQ ID NO: 458, SEQ ID NO: 459, SEQ ID NO: 460, SEQ ID NO: 461, SEQ ID NO: 462, SEQ ID NO: 463, SEQ ID NO: 464, SEQ ID NO: 465, SEQ ID NO: 466, SEQ ID NO: 467, SEQ ID NO: 468, SEQ ID NO: 469, SEQ ID NO: 470, SEQ ID NO: 471, SEQ ID NO: 472, SEQ ID NO: 473, SEQ ID NO: 474, SEQ ID NO: 475, SEQ ID NO: 476, SEQ ID NO: 477, SEQ ID NO: 478, SEQ ID NO: 479, SEQ ID NO: 480, SEQ ID NO: 481, SEQ ID NO: 482, SEQ ID NO: 483, SEQ ID NO: 484, SEQ ID NO: 485, SEQ ID NO: 486, SEQ ID NO: 487, or SEQ ID NO: 488.

[0489] In some examples of any of the ABPCs described herein, the first antigen-binding domain includes a light chain variable domain comprising SEQ ID NO: 411, and a heavy chain variable domain comprising: SEQ ID NO: 418, SEQ ID NO: 419, SEQ ID NO: 420, SEQ ID NO: 421, SEQ ID NO: 422, SEQ ID NO: 423, SEQ ID NO: 424, SEQ ID NO: 425, SEQ ID NO: 426, SEQ ID NO: 427, SEQ ID NO: 428, SEQ ID NO: 429, SEQ ID NO: 430, SEQ ID NO: 431, SEQ ID NO: 432, SEQ ID NO: 433, SEQ ID NO: 434, SEQ ID NO: 435, SEQ ID NO: 436, SEQ ID NO: 437, SEQ ID NO: 438, SEQ ID NO: 439, SEQ ID NO: 440, SEQ ID NO: 441, SEQ ID NO: 442, SEQ ID NO: 443, SEQ ID NO: 444, SEQ ID NO: 445, SEQ ID NO: 446, SEQ ID NO: 447, SEQ ID NO: 448, SEQ ID NO: 449, SEQ ID NO: 450, SEQ ID NO: 451, SEQ ID NO: 452, SEQ ID NO: 453, SEQ ID NO: 454, SEQ ID NO: 455, SEQ ID NO: 456, or SEQ ID NO: 457.

[0490] In some examples of any of the ABPCs described herein, the first antigen-binding domain includes a light chain variable domain comprising SEQ ID NO: 458, and a heavy chain variable domain comprising: SEQ ID NO: 410, SEQ ID NO: 418, SEQ ID NO: 419, SEQ ID NO: 420, SEQ ID NO: 421, SEQ ID NO: 422, SEQ ID NO: 423, SEQ ID NO: 424, SEQ ID NO: 425, SEQ ID NO: 426, SEQ ID NO: 427, SEQ ID NO: 428, SEQ ID NO: 429, SEQ ID NO: 430, SEQ ID NO: 431, SEQ ID NO: 432, SEQ ID NO: 433, SEQ ID NO: 434, SEQ ID NO: 435, SEQ ID NO: 436, SEQ ID NO: 437, SEQ ID NO: 438, SEQ ID NO: 439, SEQ ID NO: 440, SEQ ID NO: 441, SEQ ID NO: 442, SEQ ID NO: 443, SEQ ID NO: 444, SEQ ID NO: 445, SEQ ID NO: 446, SEQ ID NO: 447, SEQ ID NO: 448, SEQ ID NO: 449, SEQ ID NO: 450, SEQ ID NO: 451, SEQ ID NO: 452, SEQ ID NO: 453, SEQ ID NO: 454, SEQ ID NO: 455, SEQ ID NO: 456, or SEQ ID NO: 457.

[0491] In some examples of any of the ABPCs described herein, the first antigen-binding domain includes a light chain variable domain comprising SEQ ID NO: 459, and a heavy chain variable domain comprising: SEQ ID NO: 410, SEQ ID NO: 418, SEQ ID NO: 419, SEQ ID NO: 420, SEQ ID NO: 421, SEQ ID NO: 422, SEQ ID NO: 423, SEQ ID NO: 424, SEQ ID NO: 425, SEQ ID NO: 426, SEQ ID NO: 427, SEQ ID NO: 428, SEQ ID NO: 429, SEQ ID NO: 430, SEQ ID NO: 431, SEQ ID NO: 432, SEQ ID NO: 433, SEQ ID NO: 434, SEQ ID NO: 435, SEQ ID NO: 436, SEQ ID NO: 437, SEQ ID NO: 438, SEQ ID NO: 439, SEQ ID NO: 440, SEQ ID NO: 441, SEQ ID NO: 442, SEQ ID NO: 443, SEQ ID NO: 444, SEQ ID NO: 445, SEQ ID NO: 446, SEQ ID NO: 447, SEQ ID NO: 448, SEQ ID NO: 449, SEQ ID NO: 450, SEQ ID NO: 451, SEQ ID NO: 452, SEQ ID NO: 453, SEQ ID NO: 454, SEQ ID NO: 455, SEQ ID NO: 456, or SEQ ID NO: 457.

[0492] In some examples of any of the ABPCs described herein, the first antigen-binding domain includes a light chain variable domain comprising SEQ ID NO: 460, and a heavy chain variable domain comprising: SEQ ID NO: 410, SEQ ID NO: 418, SEQ ID NO: 419, SEQ ID NO: 420, SEQ ID NO: 421, SEQ ID NO: 422, SEQ ID NO: 423, SEQ ID NO: 424, SEQ ID NO: 425, SEQ ID NO: 426, SEQ ID NO: 427, SEQ ID NO: 428, SEQ ID NO: 429, SEQ ID NO: 430, SEQ ID NO: 431, SEQ ID NO: 432, SEQ ID NO: 433, SEQ ID NO: 434, SEQ ID NO: 435, SEQ ID NO: 436, SEQ ID NO: 437, SEQ ID NO: 438, SEQ ID NO: 439, SEQ ID NO: 440, SEQ ID NO: 441, SEQ ID NO: 442, SEQ ID NO: 443, SEQ ID NO: 444, SEQ ID NO: 445, SEQ ID NO: 446, SEQ ID NO: 447, SEQ ID NO: 448, SEQ ID NO: 449, SEQ ID NO: 450, SEQ ID NO: 451, SEQ ID NO: 452, SEQ ID NO: 453, SEQ ID NO: 454, SEQ ID NO: 455, SEQ ID NO: 456, or SEQ ID NO: 457.

[0493] In some examples of any of the ABPCs described herein, the first antigen-binding domain includes a light chain variable domain comprising SEQ ID NO: 461, and a heavy chain variable domain comprising: SEQ ID NO: 410, SEQ ID NO: 418, SEQ ID NO: 419, SEQ ID NO: 420, SEQ ID NO: 421, SEQ ID NO: 422, SEQ ID NO: 423, SEQ ID NO: 424, SEQ ID NO: 425, SEQ ID NO: 426, SEQ ID NO: 427, SEQ ID NO: 428, SEQ ID NO: 429, SEQ ID NO: 430, SEQ ID NO: 431, SEQ ID NO: 432, SEQ ID NO: 433, SEQ ID NO: 434, SEQ ID NO: 435, SEQ ID NO: 436, SEQ ID NO: 437, SEQ ID NO: 438, SEQ ID NO: 439, SEQ ID NO: 440, SEQ ID NO: 441, SEQ ID NO: 442, SEQ ID NO: 443, SEQ ID NO: 444, SEQ ID NO: 445, SEQ ID NO: 446, SEQ ID NO: 447, SEQ ID NO: 448, SEQ ID NO: 449, SEQ ID NO: 450, SEQ ID NO: 451, SEQ ID NO: 452, SEQ ID NO: 453, SEQ ID NO: 454, SEQ ID NO: 455, SEQ ID NO: 456, or SEQ ID NO: 457.

[0494] In some examples of any of the ABPCs described herein, the first antigen-binding domain includes a light chain variable domain comprising SEQ ID NO: 462, and a heavy chain variable domain comprising: SEQ ID NO: 410, SEQ ID NO: 418, SEQ ID NO: 419, SEQ ID NO: 420, SEQ ID NO: 421, SEQ ID NO: 422, SEQ ID NO: 423, SEQ ID NO: 424, SEQ ID NO: 425, SEQ ID NO: 426, SEQ ID NO: 427, SEQ ID NO: 428, SEQ ID NO: 429, SEQ ID NO: 430, SEQ ID NO: 431, SEQ ID NO: 432, SEQ ID NO: 433, SEQ ID NO: 434, SEQ ID NO: 435, SEQ ID NO: 436, SEQ ID NO: 437, SEQ ID NO: 438, SEQ ID NO: 439, SEQ ID NO: 440, SEQ ID NO: 441, SEQ ID NO: 442, SEQ ID NO: 443, SEQ ID NO: 444, SEQ ID NO: 445, SEQ ID NO: 446, SEQ ID NO: 447, SEQ ID NO: 448, SEQ ID NO: 449, SEQ ID NO: 450, SEQ ID NO: 451, SEQ ID NO: 452, SEQ ID NO: 453, SEQ ID NO: 454, SEQ ID NO: 455, SEQ ID NO: 456, or SEQ ID NO: 457.

[0495] In some examples of any of the ABPCs described herein, the first antigen-binding domain includes a light chain variable domain comprising SEQ ID NO: 463, and a heavy chain variable domain comprising: SEQ ID NO: 410, SEQ ID NO: 418, SEQ ID NO: 419, SEQ ID NO: 420, SEQ ID NO: 421, SEQ ID NO: 422, SEQ ID NO: 423, SEQ ID NO: 424, SEQ ID NO: 425, SEQ ID NO: 426, SEQ ID NO: 427, SEQ ID NO: 428, SEQ ID NO: 429, SEQ ID NO: 430, SEQ ID NO: 431, SEQ ID NO: 432, SEQ ID NO: 433, SEQ ID NO: 434, SEQ ID NO: 435, SEQ ID NO: 436, SEQ ID NO: 437, SEQ ID NO: 438, SEQ ID NO: 439, SEQ ID NO: 440, SEQ ID NO: 441, SEQ ID NO: 442, SEQ ID NO: 443, SEQ ID NO: 444, SEQ ID NO: 445, SEQ ID NO: 446, SEQ ID NO: 447, SEQ ID NO: 448, SEQ ID NO: 449, SEQ ID NO: 450, SEQ ID NO: 451, SEQ ID NO: 452, SEQ ID NO: 453, SEQ ID NO: 454, SEQ ID NO: 455, SEQ ID NO: 456, or SEQ ID NO: 457.

[0496] In some examples of any of the ABPCs described herein, the first antigen-binding domain includes a light chain variable domain comprising SEQ ID NO: 464, and a heavy chain variable domain comprising: SEQ ID NO: 410, SEQ ID NO: 418, SEQ ID NO: 419, SEQ ID NO: 420, SEQ ID NO: 421, SEQ ID NO: 422, SEQ ID NO: 423, SEQ ID NO: 424, SEQ ID NO: 425, SEQ ID NO: 426, SEQ ID NO: 427, SEQ ID NO: 428, SEQ ID NO: 429, SEQ ID NO: 430, SEQ ID NO: 431, SEQ ID NO: 432, SEQ ID NO: 433, SEQ ID NO: 434, SEQ ID NO: 435, SEQ ID NO: 436, SEQ ID NO: 437, SEQ ID NO: 438, SEQ ID NO: 439, SEQ ID NO: 440, SEQ ID NO: 441, SEQ ID NO: 442, SEQ ID NO: 443, SEQ ID NO: 444, SEQ ID NO: 445, SEQ ID NO: 446, SEQ ID NO: 447, SEQ ID NO: 448, SEQ ID NO: 449, SEQ ID NO: 450, SEQ ID NO: 451, SEQ ID NO: 452, SEQ ID NO: 453, SEQ ID NO: 454, SEQ ID NO: 455, SEQ ID NO: 456, or SEQ ID NO: 457.

[0497] In some examples of any of the ABPCs described herein, the first antigen-binding domain includes a light chain variable domain comprising SEQ ID NO: 465, and a heavy chain variable domain comprising: SEQ ID NO: 410, SEQ ID NO: 418, SEQ ID NO: 419, SEQ ID NO: 420, SEQ ID NO: 421, SEQ ID NO: 422, SEQ ID NO: 423, SEQ ID NO: 424, SEQ ID NO: 425, SEQ ID NO: 426, SEQ ID NO: 427, SEQ ID NO: 428, SEQ ID NO: 429, SEQ ID NO: 430, SEQ ID NO: 431, SEQ ID NO: 432, SEQ ID NO: 433, SEQ ID NO: 434, SEQ ID NO: 435, SEQ ID NO: 436, SEQ ID NO: 437, SEQ ID NO: 438, SEQ ID NO: 439, SEQ ID NO: 440, SEQ ID NO: 441, SEQ ID NO: 442, SEQ ID NO: 443, SEQ ID NO: 444, SEQ ID NO: 445, SEQ ID NO: 446, SEQ ID NO: 447, SEQ ID NO: 448, SEQ ID NO: 449, SEQ ID NO: 450, SEQ ID NO: 451, SEQ ID NO: 452, SEQ ID NO: 453, SEQ ID NO: 454, SEQ ID NO: 455, SEQ ID NO: 456, or SEQ ID NO: 457.

[0498] In some examples of any of the ABPCs described herein, the first antigen-binding domain includes a light chain variable domain comprising SEQ ID NO: 466, and a heavy chain variable domain comprising: SEQ ID NO: 410, SEQ ID NO: 418, SEQ ID NO: 419, SEQ ID NO: 420, SEQ ID NO: 421, SEQ ID NO: 422, SEQ ID NO: 423, SEQ ID NO: 424, SEQ ID NO: 425, SEQ ID NO: 426, SEQ ID NO: 427, SEQ ID NO: 428, SEQ ID NO: 429, SEQ ID NO: 430, SEQ ID NO: 431, SEQ ID NO: 432, SEQ ID NO: 433, SEQ ID NO: 434, SEQ ID NO: 435, SEQ ID NO: 436, SEQ ID NO: 437, SEQ ID NO: 438, SEQ ID NO: 439, SEQ ID NO: 440, SEQ ID NO: 441, SEQ ID NO: 442, SEQ ID NO: 443, SEQ ID NO: 444, SEQ ID NO: 445, SEQ ID NO: 446, SEQ ID NO: 447, SEQ ID NO: 448, SEQ ID NO: 449, SEQ ID NO: 450, SEQ ID NO: 451, SEQ ID NO: 452, SEQ ID NO: 453, SEQ ID NO: 454, SEQ ID NO: 455, SEQ ID NO: 456, or SEQ ID NO: 457.

[0499] In some examples of any of the ABPCs described herein, the first antigen-binding domain includes a light chain variable domain comprising SEQ ID NO: 467, and a heavy chain variable domain comprising: SEQ ID NO: 410, SEQ ID NO: 418, SEQ ID NO: 419, SEQ ID NO: 420, SEQ ID NO: 421, SEQ ID NO: 422, SEQ ID NO: 423, SEQ ID NO: 424, SEQ ID NO: 425, SEQ ID NO: 426, SEQ ID NO: 427, SEQ ID NO: 428, SEQ ID NO: 429, SEQ ID NO: 430, SEQ ID NO: 431, SEQ ID NO: 432, SEQ ID NO: 433, SEQ ID NO: 434, SEQ ID NO: 435, SEQ ID NO: 436, SEQ ID NO: 437, SEQ ID NO: 438, SEQ ID NO: 439, SEQ ID NO: 440, SEQ ID NO: 441, SEQ ID NO: 442, SEQ ID NO: 443, SEQ ID NO: 444, SEQ ID NO: 445, SEQ ID NO: 446, SEQ ID NO: 447, SEQ ID NO: 448, SEQ ID NO: 449, SEQ ID NO: 450, SEQ ID NO: 451, SEQ ID NO: 452, SEQ ID NO: 453, SEQ ID NO: 454, SEQ ID NO: 455, SEQ ID NO: 456, or SEQ ID NO: 457.

[0500] In some examples of any of the ABPCs described herein, the first antigen-binding domain includes a light chain variable domain comprising SEQ ID NO: 468, and a heavy chain variable domain comprising: SEQ ID NO: 410, SEQ ID NO: 418, SEQ ID NO: 419, SEQ ID NO: 420, SEQ ID NO: 421, SEQ ID NO: 422, SEQ ID NO: 423, SEQ ID NO: 424, SEQ ID NO: 425, SEQ ID NO: 426, SEQ ID NO: 427, SEQ ID NO: 428, SEQ ID NO: 429, SEQ ID NO: 430, SEQ ID NO: 431, SEQ ID NO: 432, SEQ ID NO: 433, SEQ ID NO: 434, SEQ ID NO: 435, SEQ ID NO: 436, SEQ ID NO: 437, SEQ ID NO: 438, SEQ ID NO: 439, SEQ ID NO: 440, SEQ ID NO: 441, SEQ ID NO: 442, SEQ ID NO: 443, SEQ ID NO: 444, SEQ ID NO: 445, SEQ ID NO: 446, SEQ ID NO: 447, SEQ ID NO: 448, SEQ ID NO: 449, SEQ ID NO: 450, SEQ ID NO: 451, SEQ ID NO: 452, SEQ ID NO: 453, SEQ ID NO: 454, SEQ ID NO: 455, SEQ ID NO: 456, or SEQ ID NO: 457.

[0501] In some examples of any of the ABPCs described herein, the first antigen-binding domain includes a light chain variable domain comprising SEQ ID NO: 469, and a heavy chain variable domain comprising: SEQ ID NO: 410, SEQ ID NO: 418, SEQ ID NO: 419, SEQ ID NO: 420, SEQ ID NO: 421, SEQ ID NO: 422, SEQ ID NO: 423, SEQ ID NO: 424, SEQ ID NO: 425, SEQ ID NO: 426, SEQ ID NO: 427, SEQ ID NO: 428, SEQ ID NO: 429, SEQ ID NO: 430, SEQ ID NO: 431, SEQ ID NO: 432, SEQ ID NO: 433, SEQ ID NO: 434, SEQ ID NO: 435, SEQ ID NO: 436, SEQ ID NO: 437, SEQ ID NO: 438, SEQ ID NO: 439, SEQ ID NO: 440, SEQ ID NO: 441, SEQ ID NO: 442, SEQ ID NO: 443, SEQ ID NO: 444, SEQ ID NO: 445, SEQ ID NO: 446, SEQ ID NO: 447, SEQ ID NO: 448, SEQ ID NO: 449, SEQ ID NO: 450, SEQ ID NO: 451, SEQ ID NO: 452, SEQ ID NO: 453, SEQ ID NO: 454, SEQ ID NO: 455, SEQ ID NO: 456, or SEQ ID NO: 457.

[0502] In some examples of any of the ABPCs described herein, the first antigen-binding domain includes a light chain variable domain comprising SEQ ID NO: 470, and a heavy chain variable domain comprising: SEQ ID NO: 410, SEQ ID NO: 418, SEQ ID NO: 419, SEQ ID NO: 420, SEQ ID NO: 421, SEQ ID NO: 422, SEQ ID NO: 423, SEQ ID NO: 424, SEQ ID NO: 425, SEQ ID NO: 426, SEQ ID NO: 427, SEQ ID NO: 428, SEQ ID NO: 429, SEQ ID NO: 430, SEQ ID NO: 431, SEQ ID NO: 432, SEQ ID NO: 433, SEQ ID NO: 434, SEQ ID NO: 435, SEQ ID NO: 436, SEQ ID NO: 437, SEQ ID NO: 438, SEQ ID NO: 439, SEQ ID NO: 440, SEQ ID NO: 441, SEQ ID NO: 442, SEQ ID NO: 443, SEQ ID NO: 444, SEQ ID NO: 445, SEQ ID NO: 446, SEQ ID NO: 447, SEQ ID NO: 448, SEQ ID NO: 449, SEQ ID NO: 450, SEQ ID NO: 451, SEQ ID NO: 452, SEQ ID NO: 453, SEQ ID NO: 454, SEQ ID NO: 455, SEQ ID NO: 456, or SEQ ID NO: 457.

[0503] In some examples of any of the ABPCs described herein, the first antigen-binding domain includes a light chain variable domain comprising SEQ ID NO: 471, and a heavy chain variable domain comprising: SEQ ID NO: 410, SEQ ID NO: 418, SEQ ID NO: 419, SEQ ID NO: 420, SEQ ID NO: 421, SEQ ID NO: 422, SEQ ID NO: 423, SEQ ID NO: 424, SEQ ID NO: 425, SEQ ID NO: 426, SEQ ID NO: 427, SEQ ID NO: 428, SEQ ID NO: 429, SEQ ID NO: 430, SEQ ID NO: 431, SEQ ID NO: 432, SEQ ID NO: 433, SEQ ID NO: 434, SEQ ID NO: 435, SEQ ID NO: 436, SEQ ID NO: 437, SEQ ID NO: 438, SEQ ID NO: 439, SEQ ID NO: 440, SEQ ID NO: 441, SEQ ID NO: 442, SEQ ID NO: 443, SEQ ID NO: 444, SEQ ID NO: 445, SEQ ID NO: 446, SEQ ID NO: 447, SEQ ID NO: 448, SEQ ID NO: 449, SEQ ID NO: 450, SEQ ID NO: 451, SEQ ID NO: 452, SEQ ID NO: 453, SEQ ID NO: 454, SEQ ID NO: 455, SEQ ID NO: 456, or SEQ ID NO: 457.

[0504] In some examples of any of the ABPCs described herein, the first antigen-binding domain includes a light chain variable domain comprising SEQ ID NO: 472, and a heavy chain variable domain comprising: SEQ ID NO: 410, SEQ ID NO: 418, SEQ ID NO: 419, SEQ ID NO: 420, SEQ ID NO: 421, SEQ ID NO: 422, SEQ ID NO: 423, SEQ ID NO: 424, SEQ ID NO: 425, SEQ ID NO: 426, SEQ ID NO: 427, SEQ ID NO: 428, SEQ ID NO: 429, SEQ ID NO: 430, SEQ ID NO: 431, SEQ ID NO: 432, SEQ ID NO: 433, SEQ ID NO: 434, SEQ ID NO: 435, SEQ ID NO: 436, SEQ ID NO: 437, SEQ ID NO: 438, SEQ ID NO: 439, SEQ ID NO: 440, SEQ ID NO: 441, SEQ ID NO: 442, SEQ ID NO: 443, SEQ ID NO: 444, SEQ ID NO: 445, SEQ ID NO: 446, SEQ ID NO: 447, SEQ ID NO: 448, SEQ ID NO: 449, SEQ ID NO: 450, SEQ ID NO: 451, SEQ ID NO: 452, SEQ ID NO: 453, SEQ ID NO: 454, SEQ ID NO: 455, SEQ ID NO: 456, or SEQ ID NO: 457.

[0505] In some examples of any of the ABPCs described herein, the first antigen-binding domain includes a light chain variable domain comprising SEQ ID NO: 473, and a heavy chain variable domain comprising: SEQ ID NO: 410, SEQ ID NO: 418, SEQ ID NO: 419, SEQ ID NO: 420, SEQ ID NO: 421, SEQ ID NO: 422, SEQ ID NO: 423, SEQ ID NO: 424, SEQ ID NO: 425, SEQ ID NO: 426, SEQ ID NO: 427, SEQ ID NO: 428, SEQ ID NO: 429, SEQ ID NO: 430, SEQ ID NO: 431, SEQ ID NO: 432, SEQ ID NO: 433, SEQ ID NO: 434, SEQ ID NO: 435, SEQ ID NO: 436, SEQ ID NO: 437, SEQ ID NO: 438, SEQ ID NO: 439, SEQ ID NO: 440, SEQ ID NO: 441, SEQ ID NO: 442, SEQ ID NO: 443, SEQ ID NO: 444, SEQ ID NO: 445, SEQ ID NO: 446, SEQ ID NO: 447, SEQ ID NO: 448, SEQ ID NO: 449, SEQ ID NO: 450, SEQ ID NO: 451, SEQ ID NO: 452, SEQ ID NO: 453, SEQ ID NO: 454, SEQ ID NO: 455, SEQ ID NO: 456, or SEQ ID NO: 457.

[0506] In some examples of any of the ABPCs described herein, the first antigen-binding domain includes a light chain variable domain comprising SEQ ID NO: 474, and a heavy chain variable domain comprising: SEQ ID NO: 410, SEQ ID NO: 418, SEQ ID NO: 419, SEQ ID NO: 420, SEQ ID NO: 421, SEQ ID NO: 422, SEQ ID NO: 423, SEQ ID NO: 424, SEQ ID NO: 425, SEQ ID NO: 426, SEQ ID NO: 427, SEQ ID NO: 428, SEQ ID NO: 429, SEQ ID NO: 430, SEQ ID NO: 431, SEQ ID NO: 432, SEQ ID NO: 433, SEQ ID NO: 434, SEQ ID NO: 435, SEQ ID NO: 436, SEQ ID NO: 437, SEQ ID NO: 438, SEQ ID NO: 439, SEQ ID NO: 440, SEQ ID NO: 441, SEQ ID NO: 442, SEQ ID NO: 443, SEQ ID NO: 444, SEQ ID NO: 445, SEQ ID NO: 446, SEQ ID NO: 447, SEQ ID NO: 448, SEQ ID NO: 449, SEQ ID NO: 450, SEQ ID NO: 451, SEQ ID NO: 452, SEQ ID NO: 453, SEQ ID NO: 454, SEQ ID NO: 455, SEQ ID NO: 456, or SEQ ID NO: 457.

[0507] In some examples of any of the ABPCs described herein, the first antigen-binding domain includes a light chain variable domain comprising SEQ ID NO: 475, and a heavy chain variable domain comprising: SEQ ID NO: 410, SEQ ID NO: 418, SEQ ID NO: 419, SEQ ID NO: 420, SEQ ID NO: 421, SEQ ID NO: 422, SEQ ID NO: 423, SEQ ID NO: 424, SEQ ID NO: 425, SEQ ID NO: 426, SEQ ID NO: 427, SEQ ID NO: 428, SEQ ID NO: 429, SEQ ID NO: 430, SEQ ID NO: 431, SEQ ID NO: 432, SEQ ID NO: 433, SEQ ID NO: 434, SEQ ID NO: 435, SEQ ID NO: 436, SEQ ID NO: 437, SEQ ID NO: 438, SEQ ID NO: 439, SEQ ID NO: 440, SEQ ID NO: 441, SEQ ID NO: 442, SEQ ID NO: 443, SEQ ID NO: 444, SEQ ID NO: 445, SEQ ID NO: 446, SEQ ID NO: 447, SEQ ID NO: 448, SEQ ID NO: 449, SEQ ID NO: 450, SEQ ID NO: 451, SEQ ID NO: 452, SEQ ID NO: 453, SEQ ID NO: 454, SEQ ID NO: 455, SEQ ID NO: 456, or SEQ ID NO: 457.

[0508] In some examples of any of the ABPCs described herein, the first antigen-binding domain includes a light chain variable domain comprising SEQ ID NO: 476, and a heavy chain variable domain comprising: SEQ ID NO: 410, SEQ ID NO: 418, SEQ ID NO: 419, SEQ ID NO: 420, SEQ ID NO: 421, SEQ ID NO: 422, SEQ ID NO: 423, SEQ ID NO: 424, SEQ ID NO: 425, SEQ ID NO: 426, SEQ ID NO: 427, SEQ ID NO: 428, SEQ ID NO: 429, SEQ ID NO: 430, SEQ ID NO: 431, SEQ ID NO: 432, SEQ ID NO: 433, SEQ ID NO: 434, SEQ ID NO: 435, SEQ ID NO: 436, SEQ ID NO: 437, SEQ ID NO: 438, SEQ ID NO: 439, SEQ ID NO: 440, SEQ ID NO: 441, SEQ ID NO: 442, SEQ ID NO: 443, SEQ ID NO: 444, SEQ ID NO: 445, SEQ ID NO: 446, SEQ ID NO: 447, SEQ ID NO: 448, SEQ ID NO: 449, SEQ ID NO: 450, SEQ ID NO: 451, SEQ ID NO: 452, SEQ ID NO: 453, SEQ ID NO: 454, SEQ ID NO: 455, SEQ ID NO: 456, or SEQ ID NO: 457.

[0509] In some examples of any of the ABPCs described herein, the first antigen-binding domain includes a light chain variable domain comprising SEQ ID NO: 477, and a heavy chain variable domain comprising: SEQ ID NO: 410, SEQ ID NO: 418, SEQ ID NO: 419, SEQ ID NO: 420, SEQ ID NO: 421, SEQ ID NO: 422, SEQ ID NO: 423, SEQ ID NO: 424, SEQ ID NO: 425, SEQ ID NO: 426, SEQ ID NO: 427, SEQ ID NO: 428, SEQ ID NO: 429, SEQ ID NO: 430, SEQ ID NO: 431, SEQ ID NO: 432, SEQ ID NO: 433, SEQ ID NO: 434, SEQ ID NO: 435, SEQ ID NO: 436, SEQ ID NO: 437, SEQ ID NO: 438, SEQ ID NO: 439, SEQ ID NO: 440, SEQ ID NO: 441, SEQ ID NO: 442, SEQ ID NO: 443, SEQ ID NO: 444, SEQ ID NO: 445, SEQ ID NO: 446, SEQ ID NO: 447, SEQ ID NO: 448, SEQ ID NO: 449, SEQ ID NO: 450, SEQ ID NO: 451, SEQ ID NO: 452, SEQ ID NO: 453, SEQ ID NO: 454, SEQ ID NO: 455, SEQ ID NO: 456, or SEQ ID NO: 457.

[0510] In some examples of any of the ABPCs described herein, the first antigen-binding domain includes a light chain variable domain comprising SEQ ID NO: 478, and a heavy chain variable domain comprising: SEQ ID NO: 410, SEQ ID NO: 418, SEQ ID NO: 419, SEQ ID NO: 420, SEQ ID NO: 421, SEQ ID NO: 422, SEQ ID NO: 423, SEQ ID NO: 424, SEQ ID NO: 425, SEQ ID NO: 426, SEQ ID NO: 427, SEQ ID NO: 428, SEQ ID NO: 429, SEQ ID NO: 430, SEQ ID NO: 431, SEQ ID NO: 432, SEQ ID NO: 433, SEQ ID NO: 434, SEQ ID NO: 435, SEQ ID NO: 436, SEQ ID NO: 437, SEQ ID NO: 438, SEQ ID NO: 439, SEQ ID NO: 440, SEQ ID NO: 441, SEQ ID NO: 442, SEQ ID NO: 443, SEQ ID NO: 444, SEQ ID NO: 445, SEQ ID NO: 446, SEQ ID NO: 447, SEQ ID NO: 448, SEQ ID NO: 449, SEQ ID NO: 450, SEQ ID NO: 451, SEQ ID NO: 452, SEQ ID NO: 453, SEQ ID NO: 454, SEQ ID NO: 455, SEQ ID NO: 456, or SEQ ID NO: 457.

[0511] In some examples of any of the ABPCs described herein, the first antigen-binding domain includes a light chain variable domain comprising SEQ ID NO: 479, and a heavy chain variable domain comprising: SEQ ID NO: 410, SEQ ID NO: 418, SEQ ID NO: 419, SEQ ID NO: 420, SEQ ID NO: 421, SEQ ID NO: 422, SEQ ID NO: 423, SEQ ID NO: 424, SEQ ID NO: 425, SEQ ID NO: 426, SEQ ID NO: 427, SEQ ID NO: 428, SEQ ID NO: 429, SEQ ID NO: 430, SEQ ID NO: 431, SEQ ID NO: 432, SEQ ID NO: 433, SEQ ID NO: 434, SEQ ID NO: 435, SEQ ID NO: 436, SEQ ID NO: 437, SEQ ID NO: 438, SEQ ID NO: 439, SEQ ID NO: 440, SEQ ID NO: 441, SEQ ID NO: 442, SEQ ID NO: 443, SEQ ID NO: 444, SEQ ID NO: 445, SEQ ID NO: 446, SEQ ID NO: 447, SEQ ID NO: 448, SEQ ID NO: 449, SEQ ID NO: 450, SEQ ID NO: 451, SEQ ID NO: 452, SEQ ID NO: 453, SEQ ID NO: 454, SEQ ID NO: 455, SEQ ID NO: 456, or SEQ ID NO: 457.

[0512] In some examples of any of the ABPCs described herein, the first antigen-binding domain includes a light chain variable domain comprising SEQ ID NO: 480, and a heavy chain variable domain comprising: SEQ ID NO: 410, SEQ ID NO: 418, SEQ ID NO: 419, SEQ ID NO: 420, SEQ ID NO: 421, SEQ ID NO: 422, SEQ ID NO: 423, SEQ ID NO: 424, SEQ ID NO: 425, SEQ ID NO: 426, SEQ ID NO: 427, SEQ ID NO: 428, SEQ ID NO: 429, SEQ ID NO: 430, SEQ ID NO: 431, SEQ ID NO: 432, SEQ ID NO: 433, SEQ ID NO: 434, SEQ ID NO: 435, SEQ ID NO: 436, SEQ ID NO: 437, SEQ ID NO: 438, SEQ ID NO: 439, SEQ ID NO: 440, SEQ ID NO: 441, SEQ ID NO: 442, SEQ ID NO: 443, SEQ ID NO: 444, SEQ ID NO: 445, SEQ ID NO: 446, SEQ ID NO: 447, SEQ ID NO: 448, SEQ ID NO: 449, SEQ ID NO: 450, SEQ ID NO: 451, SEQ ID NO: 452, SEQ ID NO: 453, SEQ ID NO: 454, SEQ ID NO: 455, SEQ ID NO: 456, or SEQ ID NO: 457.

[0513] In some examples of any of the ABPCs described herein, the first antigen-binding domain includes a light chain variable domain comprising SEQ ID NO: 481, and a heavy chain variable domain comprising: SEQ ID NO: 410, SEQ ID NO: 418, SEQ ID NO: 419, SEQ ID NO: 420, SEQ ID NO: 421, SEQ ID NO: 422, SEQ ID NO: 423, SEQ ID NO: 424, SEQ ID NO: 425, SEQ ID NO: 426, SEQ ID NO: 427, SEQ ID NO: 428, SEQ ID NO: 429, SEQ ID NO: 430, SEQ ID NO: 431, SEQ ID NO: 432, SEQ ID NO: 433, SEQ ID NO: 434, SEQ ID NO: 435, SEQ ID NO: 436, SEQ ID NO: 437, SEQ ID NO: 438, SEQ ID NO: 439, SEQ ID NO: 440, SEQ ID NO: 441, SEQ ID NO: 442, SEQ ID NO: 443, SEQ ID NO: 444, SEQ ID NO: 445, SEQ ID NO: 446, SEQ ID NO: 447, SEQ ID NO: 448, SEQ ID NO: 449, SEQ ID NO: 450, SEQ ID NO: 451, SEQ ID NO: 452, SEQ ID NO: 453, SEQ ID NO: 454, SEQ ID NO: 455, SEQ ID NO: 456, or SEQ ID NO: 457.

[0514] In some examples of any of the ABPCs described herein, the first antigen-binding domain includes a light chain variable domain comprising SEQ ID NO: 482, and a heavy chain variable domain comprising: SEQ ID NO: 410, SEQ ID NO: 418, SEQ ID NO: 419, SEQ ID NO: 420, SEQ ID NO: 421, SEQ ID NO: 422, SEQ ID NO: 423, SEQ ID NO: 424, SEQ ID NO: 425, SEQ ID NO: 426, SEQ ID NO: 427, SEQ ID NO: 428, SEQ ID NO: 429, SEQ ID NO: 430, SEQ ID NO: 431, SEQ ID NO: 432, SEQ ID NO: 433, SEQ ID NO: 434, SEQ ID NO: 435, SEQ ID NO: 436, SEQ ID NO: 437, SEQ ID NO: 438, SEQ ID NO: 439, SEQ ID NO: 440, SEQ ID NO: 441, SEQ ID NO: 442, SEQ ID NO: 443, SEQ ID NO: 444, SEQ ID NO: 445, SEQ ID NO: 446, SEQ ID NO: 447, SEQ ID NO: 448, SEQ ID NO: 449, SEQ ID NO: 450, SEQ ID NO: 451, SEQ ID NO: 452, SEQ ID NO: 453, SEQ ID NO: 454, SEQ ID NO: 455, SEQ ID NO: 456, or SEQ ID NO: 457.

[0515] In some examples of any of the ABPCs described herein, the first antigen-binding domain includes a light chain variable domain comprising SEQ ID NO: 483, and a heavy chain variable domain comprising: SEQ ID NO: 410, SEQ ID NO: 418, SEQ ID NO: 419, SEQ ID NO: 420, SEQ ID NO: 421, SEQ ID NO: 422, SEQ ID NO: 423, SEQ ID NO: 424, SEQ ID NO: 425, SEQ ID NO: 426, SEQ ID NO: 427, SEQ ID NO: 428, SEQ ID NO: 429, SEQ ID NO: 430, SEQ ID NO: 431, SEQ ID NO: 432, SEQ ID NO: 433, SEQ ID NO: 434, SEQ ID NO: 435, SEQ ID NO: 436, SEQ ID NO: 437, SEQ ID NO: 438, SEQ ID NO: 439, SEQ ID NO: 440, SEQ ID NO: 441, SEQ ID NO: 442, SEQ ID NO: 443, SEQ ID NO: 444, SEQ ID NO: 445, SEQ ID NO: 446, SEQ ID NO: 447, SEQ ID NO: 448, SEQ ID NO: 449, SEQ ID NO: 450, SEQ ID NO: 451, SEQ ID NO: 452, SEQ ID NO: 453, SEQ ID NO: 454, SEQ ID NO: 455, SEQ ID NO: 456, or SEQ ID NO: 457.

[0516] In some examples of any of the ABPCs described herein, the first antigen-binding domain includes a light chain variable domain comprising SEQ ID NO: 484, and a heavy chain variable domain comprising: SEQ ID NO: 410, SEQ ID NO: 418, SEQ ID NO: 419, SEQ ID NO: 420, SEQ ID NO: 421, SEQ ID NO: 422, SEQ ID NO: 423, SEQ ID NO: 424, SEQ ID NO: 425, SEQ ID NO: 426, SEQ ID NO: 427, SEQ ID NO: 428, SEQ ID NO: 429, SEQ ID NO: 430, SEQ ID NO: 431, SEQ ID NO: 432, SEQ ID NO: 433, SEQ ID NO: 434, SEQ ID NO: 435, SEQ ID NO: 436, SEQ ID NO: 437, SEQ ID NO: 438, SEQ ID NO: 439, SEQ ID NO: 440, SEQ ID NO: 441, SEQ ID NO: 442, SEQ ID NO: 443, SEQ ID NO: 444, SEQ ID NO: 445, SEQ ID NO: 446, SEQ ID NO: 447, SEQ ID NO: 448, SEQ ID NO: 449, SEQ ID NO: 450, SEQ ID NO: 451, SEQ ID NO: 452, SEQ ID NO: 453, SEQ ID NO: 454, SEQ ID NO: 455, SEQ ID NO: 456, or SEQ ID NO: 457.

[0517] In some examples of any of the ABPCs described herein, the first antigen-binding domain includes a light chain variable domain comprising SEQ ID NO: 485, and a heavy chain variable domain comprising: SEQ ID NO: 410, SEQ ID NO: 418, SEQ ID NO: 419, SEQ ID NO: 420, SEQ ID NO: 421, SEQ ID NO: 422, SEQ ID NO: 423, SEQ ID NO: 424, SEQ ID NO: 425, SEQ ID NO: 426, SEQ ID NO: 427, SEQ ID NO: 428, SEQ ID NO: 429, SEQ ID NO: 430, SEQ ID NO: 431, SEQ ID NO: 432, SEQ ID NO: 433, SEQ ID NO: 434, SEQ ID NO: 435, SEQ ID NO: 436, SEQ ID NO: 437, SEQ ID NO: 438, SEQ ID NO: 439, SEQ ID NO: 440, SEQ ID NO: 441, SEQ ID NO: 442, SEQ ID NO: 443, SEQ ID NO: 444, SEQ ID NO: 445, SEQ ID NO: 446, SEQ ID NO: 447, SEQ ID NO: 448, SEQ ID NO: 449, SEQ ID NO: 450, SEQ ID NO: 451, SEQ ID NO: 452, SEQ ID NO: 453, SEQ ID NO: 454, SEQ ID NO: 455, SEQ ID NO: 456, or SEQ ID NO: 457.

[0518] In some examples of any of the ABPCs described herein, the first antigen-binding domain includes a light chain variable domain comprising SEQ ID NO: 486, and a heavy chain variable domain comprising: SEQ ID NO: 410, SEQ ID NO: 418, SEQ ID NO: 419, SEQ ID NO: 420, SEQ ID NO: 421, SEQ ID NO: 422, SEQ ID NO: 423, SEQ ID NO: 424, SEQ ID NO: 425, SEQ ID NO: 426, SEQ ID NO: 427, SEQ ID NO: 428, SEQ ID NO: 429, SEQ ID NO: 430, SEQ ID NO: 431, SEQ ID NO: 432, SEQ ID NO: 433, SEQ ID NO: 434, SEQ ID NO: 435, SEQ ID NO: 436, SEQ ID NO: 437, SEQ ID NO: 438, SEQ ID NO: 439, SEQ ID NO: 440, SEQ ID NO: 441, SEQ ID NO: 442, SEQ ID NO: 443, SEQ ID NO: 444, SEQ ID NO: 445, SEQ ID NO: 446, SEQ ID NO: 447, SEQ ID NO: 448, SEQ ID NO: 449, SEQ ID NO: 450, SEQ ID NO: 451, SEQ ID NO: 452, SEQ ID NO: 453, SEQ ID NO: 454, SEQ ID NO: 455, SEQ ID NO: 456, or SEQ ID NO: 457.

[0519] In some examples of any of the ABPCs described herein, the first antigen-binding domain includes a light chain variable domain comprising SEQ ID NO: 487, and a heavy chain variable domain comprising: SEQ ID NO: 410, SEQ ID NO: 418, SEQ ID NO: 419, SEQ ID NO: 420, SEQ ID NO: 421, SEQ ID NO: 422, SEQ ID NO: 423, SEQ ID NO: 424, SEQ ID NO: 425, SEQ ID NO: 426, SEQ ID NO: 427, SEQ ID NO: 428, SEQ ID NO: 429, SEQ ID NO: 430, SEQ ID NO: 431, SEQ ID NO: 432, SEQ ID NO: 433, SEQ ID NO: 434, SEQ ID NO: 435, SEQ ID NO: 436, SEQ ID NO: 437, SEQ ID NO: 438, SEQ ID NO: 439, SEQ ID NO: 440, SEQ ID NO: 441, SEQ ID NO: 442, SEQ ID NO: 443, SEQ ID NO: 444, SEQ ID NO: 445, SEQ ID NO: 446, SEQ ID NO: 447, SEQ ID NO: 448, SEQ ID NO: 449, SEQ ID NO: 450, SEQ ID NO: 451, SEQ ID NO: 452, SEQ ID NO: 453, SEQ ID NO: 454, SEQ ID NO: 455, SEQ ID NO: 456, or SEQ ID NO: 457.

[0520] In some examples of any of the ABPCs described herein, the first antigen-binding domain includes a light chain variable domain comprising SEQ ID NO: 488, and a heavy chain variable domain comprising: SEQ ID NO: 410, SEQ ID NO: 418, SEQ ID NO: 419, SEQ ID NO: 420, SEQ ID NO: 421, SEQ ID NO: 422, SEQ ID NO: 423, SEQ ID NO: 424, SEQ ID NO: 425, SEQ ID NO: 426, SEQ ID NO: 427, SEQ ID NO: 428, SEQ ID NO: 429, SEQ ID NO: 430, SEQ ID NO: 431, SEQ ID NO: 432, SEQ ID NO: 433, SEQ ID NO: 434, SEQ ID NO: 435, SEQ ID NO: 436, SEQ ID NO: 437, SEQ ID NO: 438, SEQ ID NO: 439, SEQ ID NO: 440, SEQ ID NO: 441, SEQ ID NO: 442, SEQ ID NO: 443, SEQ ID NO: 444, SEQ ID NO: 445, SEQ ID NO: 446, SEQ ID NO: 447, SEQ ID NO: 448, SEQ ID NO: 449, SEQ ID NO: 450, SEQ ID NO: 451, SEQ ID NO: 452, SEQ ID NO: 453, SEQ ID NO: 454, SEQ ID NO: 455, SEQ ID NO: 456, or SEQ ID NO: 457.

[0521] In some examples of any of the ABPCs described herein, the first antigen-binding domain includes a heavy chain variable domain of 19A3 with one or more (e.g., one, two, three, four, five, six, seven, eight, nine, ten, eleven, twelve, thirteen, fourteen, fifteen, sixteen, seventeen, eighteen, nineteen, or twenty) amino acids substituted with a histidine. In some examples of any of the ABPCs described herein, the first antigen-binding domain includes a light chain variable domain of 19A3 with one or more (e.g., one, two, three, four, five, six, seven, eight, nine, ten, eleven, twelve, thirteen, fourteen, fifteen, sixteen, seventeen, eighteen, nineteen, or twenty) amino acids substituted with a histidine. In some examples of any of the ABPCs described herein, the first antigen-binding domain includes a heavy chain variable domain of 19A3 with one or more (e.g., one, two, three, four, five, six, seven, eight, nine, ten, eleven, twelve, thirteen, fourteen, fifteen, sixteen, seventeen, eighteen, nineteen, or twenty) amino acids substituted with a histidine; and a light chain variable domain of 19A3 with one or more (e.g., one, two, three, four, five, six, seven, eight, nine, ten, eleven, twelve, thirteen, fourteen, fifteen, sixteen, seventeen, eighteen, nineteen, or twenty) amino acids substituted with a histidine. In some examples of any of the ABPCs described herein, the heavy chain variable domain of 19A3 comprises SEQ ID NO: 489. In some examples of any of the ABPCs described herein, the light chain variable domain of 19A3 comprises SEQ ID NO: 490.

[0522] In some examples of any of the ABPCs described herein, the first antigen-binding domain comprises a heavy chain variable domain comprising a CDR1, a CDR2, and a CDR3 of SEQ ID NO: 491, SEQ ID NO: 492, and SEQ ID NO: 493, respectively, with collectively a total of one or more (e.g., one, two, three, four, five, six, seven, eight, nine, or ten) amino acid positions in SEQ ID NOs: 491-493 substituted with a histidine. In some examples of any of the ABPCs described herein, the first antigen-binding domain comprises a light chain variable domain comprising a CDR1, a CDR2, and a CDR3 of SEQ ID NO: 494, SEQ ID NO: 495, and SEQ ID NO: 496, respectively, with collectively a total of one or more (e.g., one, two, three, four, five, six, seven, eight, nine, or ten) amino acid positions in SEQ ID NOs: 494-496 substituted with a histidine. In some examples of any of the ABPCs described herein, the first antigen-binding domain includes: a heavy chain variable domain comprising a CDR1, a CDR2, and a CDR3 of SEQ ID NO: 491, SEQ ID NO: 492, and SEQ ID NO: 493, respectively, with collectively a total of one or more (e.g., one, two, three, four, five, six, seven, eight, nine, or ten) amino acid positions in SEQ ID NOs: 491-493 substituted with a histidine; and a light chain variable domain comprising a CDR1, a CDR2, and a CDR3 of SEQ ID NO: 494, SEQ ID NO: 495, and SEQ ID NO: 496, respectively, with collectively a total of one or more (e.g., one, two, three, four, five, six, seven, eight, nine, or ten) amino acid positions in SEQ ID NOs: 494-496 substituted with a histidine.

[0523] In some examples of any of the ABPCs described herein, the first antigen-binding domain includes a heavy chain variable domain that is at least 90% (e.g., at least 92%, at least 94%, at least 96%, at least 98%, at least 99%, or 100%) identical to SEQ ID NO: 489, where the heavy chain variable domain includes a histidine at one or more (e.g., one, two, three, four, five, six, seven, eight, nine, ten, eleven, twelve, thirteen, fourteen, fifteen, sixteen, seventeen, eighteen, nineteen, or twenty) amino acid positions in SEQ ID NO: 489 selected from the group consisting of: 24, 26, 27, 31, 32, 34, 97, 98, 100, 102, 103, 105, 110, and 111. In some examples of any of the ABPCs described herein, the first antigen-binding domain includes a light chain variable domain that is at least 90% (e.g., at least 92%, at least 94%, at least 96%, at least 98%, at least 99%, or 100%) identical to SEQ ID NO: 490, where the light chain variable domain includes a histidine at one or more (e.g., one, two, three, four, five, six, seven, eight, nine, ten, eleven, twelve, thirteen, fourteen, fifteen, sixteen, seventeen, eighteen, nineteen, or twenty) amino acid positions in SEQ ID NO: 490 selected from the group consisting of: 55 and 56. In some examples of any of the ABPCs described herein the first antigen-binding domain includes: a heavy chain variable domain that is at least 90% (e.g., at least 92%, at least 94%, at least 96%, at least 98%, at least 99%, or 100%) identical to SEQ ID NO: 489, where the heavy chain variable domain includes a histidine at one or more (e.g., one, two, three, four, five, six, seven, eight, nine, ten, eleven, twelve, thirteen, fourteen, fifteen, sixteen, seventeen, eighteen, nineteen, or twenty) amino acid positions in SEQ ID NO: 489 selected from the group consisting of: 24, 26, 27, 31, 32, 34, 97, 98, 100, 102, 103, 105, 110, and 111, and a light chain variable domain that is at least 90% (e.g., at least 92%, at least 94%, at least 96%, at least 98%, at least 99%, or 100%) identical to SEQ ID NO: 490, where the light chain variable domain includes a histidine at one or more (e.g., one, two, three, four, five, six, seven, eight, nine, ten, eleven, twelve, thirteen, fourteen, fifteen, sixteen, seventeen, eighteen, nineteen, or twenty) amino acid positions in SEQ ID NO: 490 selected from the group consisting of: 55 and 56.

[0524] In some examples of any of the ABPCs described herein, a heavy chain variable domain includes a heavy chain variable domain that is at least 90% (e.g., at least 92%, at least 94%, at least 96%, at least 98%, at least 99%, or 100%) identical to SEQ ID NO: 489, where the heavy chain variable domain includes a histidine at any of the specific combinations of one or more amino acid positions in SEQ ID NO: 489 listed in Table 10.

TABLE 10
Exemplary Combinations of Amino Acid Positions in SEQ
ID NO: 489 that can be Substituted with Histidine

24 + 26, 24 + 27, 24 + 31, 24 + 32, 24 + 34, 24 + 97, 24 + 98, 24 + 100, 24 + 102, 24 +
103, 24 + 105, 24 + 110, 24 + 111, 26 + 27, 26 + 31, 26 + 32, 26 + 34, 26 + 97, 26 + 98, 26 +
100, 26 + 102, 26 + 103, 26 + 105, 26 + 110, 26 + 111, 27 + 31, 27 + 32, 27 + 34, 27 +
97, 27 + 98, 27 + 100, 27 + 102, 27 + 103, 27 + 105, 27 + 110, 27 + 111, 31 + 32, 31 + 34,
31 + 97, 31 + 98, 31 + 100, 31 + 102, 31 + 103, 31 + 105, 31 + 110, 31 + 111, 32 + 34, 32 +
97, 32 + 98, 32 + 100, 32 + 102, 32 + 103, 32 + 105, 32 + 110, 32 + 111, 34 + 97, 34 +
98, 34 + 100, 34 + 102, 34 + 103, 34 + 105, 34 + 110, 34 + 111, 97 + 98, 97 + 100, 97 +
102, 97 + 103, 97 + 105, 97 + 110, 97 + 111, 98 + 100, 98 + 102, 98 + 103, 98 + 105, 98 +
110, 98 + 111, 100 + 102, 100 + 103, 100 + 105, 100 + 110, 100 + 111, 102 + 103, 102 +
105, 102 + 110, 102 + 111, 103 + 105, 103 + 110, 103 + 111, 105 + 110, 105 + 111, 110 +
111, 24 + 26 + 27, 24 + 26 + 31, 24 + 26 + 32, 24 + 26 + 34, 24 + 26 + 97, 24 + 26 + 98,
24 + 26 + 100, 24 + 26 + 102, 24 + 26 + 103, 24 + 26 + 105, 24 + 26 + 110, 24 + 26 + 111,
24 + 27 + 31, 24 + 27 + 32, 24 + 27 + 34, 24 + 27 + 97, 24 + 27 + 98, 24 + 27 + 100, 24 +
27 + 102, 24 + 27 + 103, 24 + 27 + 105, 24 + 27 + 110, 24 + 27 + 111, 24 + 31 + 32, 24 +
31 + 34, 24 + 31 + 97, 24 + 31 + 98, 24 + 31 + 100, 24 + 31 + 102, 24 + 31 + 103, 24 + 31 +
105, 24 + 31 + 110, 24 + 31 + 111, 24 + 32 + 34, 24 + 32 + 97, 24 + 32 + 98, 24 + 32 +
100, 24 + 32 + 102, 24 + 32 + 103, 24 + 32 + 105, 24 + 32 + 110, 24 + 32 + 111, 24 + 34 +
97, 24 + 34 + 98, 24 + 34 + 100, 24 + 34 + 102, 24 + 34 + 103, 24 + 34 + 105, 24 + 34 +
110, 24 + 34 + 111, 24 + 97 + 98, 24 + 97 + 100, 24 + 97+ 102, 24 + 97 + 103, 24 + 97 +
105, 24 + 97 + 110, 24 + 97 + 111, 24 + 98 + 100, 24 + 98 + 102, 24 + 98 + 103, 24 + 98 +
105, 24 + 98 + 110, 24 + 98 + 111, 24 + 100 + 102, 24 + 100 + 103, 24 + 100 + 105, 24 +
100 + 110, 24 + 100 + 111, 24 + 102 + 103, 24 + 102 + 105, 24 + 102 + 110, 24 + 102 +
111, 24 + 103 + 105, 24 + 103 + 110, 24 + 103 + 111, 24 + 105 + 110, 24 + 105 + 111, 24 +
110 + 111, 26 + 27 + 31, 26 + 27 + 32, 26 + 27 + 34, 26 + 27 + 97, 26 + 27 + 98, 26 + 27 +
100, 26 + 27 + 102, 26 + 27 + 103, 26 + 27 + 105, 26 + 27 + 110, 26 + 27 + 111, 26 + 31 +
32, 26 + 31 + 34, 26 + 31 + 97, 26 + 31 + 98, 26 + 31 + 100, 26 + 31 + 102, 26 + 31 +
103, 26 + 31 + 105, 26 + 31 + 110, 26 + 31 + 111, 26 + 32 + 34, 26 + 32 + 97, 26 + 32 +
98, 26 + 32 + 100, 26 + 32 + 102, 26 + 32 + 103, 26 + 32 + 105, 26 + 32 + 110, 26 + 32 +
111, 26 + 34 + 97, 26 + 34 + 98, 26 + 34 + 100, 26 + 34 + 102, 26 + 34 + 103, 26 + 34 +
105, 26 + 34 + 110, 26 + 34 + 111, 26 + 97 + 98, 26 + 97 + 100, 26 + 97 + 102, 26 + 97 +
103, 26 + 97 + 105, 26 + 97 + 110, 26 + 97 + 111, 26 + 98 + 100, 26 + 98 + 102, 26 + 98 +
103, 26 + 98 + 105, 26 + 98 + 110, 26 + 98 + 111, 26 + 100 + 102, 26 + 100 + 103, 26 +
100 + 105, 26 + 100 + 110, 26 + 100 + 111, 26 + 102 + 103, 26 + 102 + 105, 26 + 102 +
110, 26 + 102 + 111, 26 + 103 + 105, 26 + 103 + 110, 26 + 103 + 111, 26 + 105 + 110, 26 +
105 + 111, 26 + 110 + 111, 27 + 31 + 32, 27 + 31 + 34, 27 + 31 + 97, 27 + 31 + 98, 27 +
31 + 100, 27 + 31 + 102, 27 + 31 + 103, 27 + 31 + 105, 27 + 31 + 110, 27 + 31 + 111, 27 +
32 + 34, 27 + 32 + 97, 27 + 32 + 98, 27 + 32 + 100, 27 + 32 + 102, 27 + 32 + 103, 27 + 32 +
105, 27 + 32 + 110, 27 + 32 + 111, 27 + 34 + 97, 27 + 34 + 98, 27 + 34 + 100, 27 + 34 +
102, 27 + 34 + 103, 27 + 34 + 105, 27 + 34 + 110, 27 + 34 + 111, 27 + 97 + 98, 27 + 97 +
100, 27 + 97 + 102, 27 + 97 + 103, 27 + 97 + 105, 27 + 97 + 110, 27 + 97 + 111, 27 + 98 +
100, 27 + 98 + 102, 27 + 98 + 103, 27 + 98 + 105, 27 + 98 + 110, 27 + 98 + 111, 27 + 100 +
102, 27 + 100 + 103, 27 + 100 + 105, 27 + 100 + 110, 27 + 100 + 111, 27 + 102 + 103,
27 + 102 + 105, 27 + 102 + 110, 27 + 102 + 111, 27 + 103 + 105, 27 + 103 + 110, 27 +
103 + 111, 27+ 105 + 110, 27 + 105 + 111, 27 + 110 + 111, 31 + 32 + 34, 31 + 32 + 97,
31 + 32 + 98, 31 + 32 + 100, 31 + 32 + 102, 31 + 32 + 103, 31 + 32 + 105, 31 + 32 + 110,
31 + 32 + 111, 31 + 34 + 97, 31 + 34 + 98, 31 + 34 + 100, 31 + 34 + 102, 31 + 34 + 103,
31 + 34 + 105, 31 + 34 + 110, 31 + 34 + 111, 31 + 97 + 98, 31 + 97 + 100, 31 + 97 + 102,
31 + 97 + 103, 31 + 97 + 105, 31 + 97 + 110, 31 + 97 + 111, 31 + 98 + 100, 31 + 98 + 102,
31 + 98 + 103, 31 + 98 + 105, 31 + 98 + 110, 31 + 98 + 111, 31 + 100 + 102, 31 + 100 +
103, 31 + 100 + 105, 31 + 100 + 110, 31 + 100 + 111, 31 + 102 + 103, 31 + 102 + 105, 31 +
102 + 110, 31 + 102 + 111, 31 + 103 + 105, 31 + 103 + 110, 31 + 103 + 111, 31 + 105 +
110, 31 + 105 + 111, 31 + 110 + 111, 32 + 34 + 97, 32 + 34 + 98, 32 + 34 + 100, 32 + 34 +
102, 32 + 34 + 103, 32 + 34 + 105, 32 + 34 + 110, 32 + 34 + 111, 32 + 97 + 98, 32 + 97 +
100, 32 + 97 + 102, 32 + 97 + 103, 32 + 97 + 105, 32 + 97 + 110, 32 + 97 + 111, 32 + 98 +
100, 32 + 98 + 102, 32 + 98 + 103, 32 + 98 + 105, 32 + 98 + 110, 32 + 98 + 111, 32 + 100 +
102, 32 + 100 + 103, 32 + 100 + 105, 32 + 100 + 110, 32 + 100 + 111, 32 + 102 + 103,
32 + 102 + 105, 32 + 102 + 110, 32 + 102 + 111, 32 + 103 + 105, 32 + 103 + 110, 32 +
103 + 111, 32 + 105 + 110, 32 + 105 + 111, 32 + 110 + 111, 34 + 97 + 98, 34 + 97 + 100,
34 + 97 + 102, 34 + 97 + 103, 34 + 97 + 105, 34 + 97 + 110, 34 + 97 + 111, 34 + 98 + 100,
34 + 98 + 102, 34 + 98 + 103, 34 + 98 + 105, 34 + 98 + 110, 34 + 98 + 111, 34 + 100 +
102, 34 + 100 + 103, 34 + 100 + 105, 34 + 100 + 110, 34 + 100 + 111, 34 + 102 + 103, 34 +
102 + 105, 34 + 102 + 110, 34 + 102 + 111, 34 + 103 + 105, 34 + 103 + 110, 34 + 103 +
111, 34 + 105 + 110, 34 + 105 + 111, 34 + 110 + 111, 97 + 98 + 100, 97 + 98 + 102, 97 +
98 + 103, 97 + 98 + 105, 97 + 98 + 110, 97 + 98 + 111, 97 + 100 + 102, 97 + 100 + 103,
97 + 100 + 105, 97 + 100 + 110, 97 + 100 + 111, 97 + 102 + 103, 97 + 102 + 105, 97 +
102 + 110, 97 + 102 + 111, 97 + 103 + 105, 97 + 103 + 110, 97 + 103 + 111, 97 + 105 +
110, 97 + 105 + 111, 97 + 110 + 111, 98 + 100 + 102, 98 + 100 + 103, 98 + 100 + 105, 98 +
100 + 110, 98 + 100 + 111, 98 + 102 + 103, 98 + 102 + 105, 98 + 102 + 110, 98 + 102 +
111, 98 + 103 + 105, 98 + 103 + 110, 98 + 103 + 111, 98 + 105 + 110, 98 + 105 + 111, 98 +
110 + 111, 100 + 102 + 103, 100 + 102 + 105, 100 + 102 + 110, 100 + 102 + 111, 100 +
103 + 105, 100 + 103 + 110, 100 + 103 + 111, 100 + 105 + 110, 100 + 105 + 111, 100 +
110 + 111, 102 + 103 + 105, 102 + 103 + 110, 102 + 103 + 111, 102 + 105 + 110, 102 +
105 + 111, 102 + 110 + 111, 103 + 105 + 110, 103 + 105 + 111, 103 + 110 + 111, 105 +
110 + 111

[0525] In some examples of any of the ABPCs described herein, a light chain variable domain includes a light chain variable domain that is at least 90% (e.g., at least 92%, at least 94%, at least 96%, at least 98%, at least 99%, or 100%) identical to SEQ ID NO: 490, where the light chain variable domain includes a histidine at any of the specific combinations of one or more amino acid positions in SEQ ID NO: 490 listed in Table 2.

TABLE 11
Exemplary Combinations of Amino Acid Positions in SEQ
ID NO: 490 that can be Substituted with Histidine

55 + 56

[0526] In some examples of any of the ABPCs described herein, the first antigen-binding domain includes a heavy chain variable domain that is at least 90% (e.g., at least 92%, at least 94%, at least 96%, at least 98%, at least 99%, or 100%) identical to SEQ ID NO: 489, where the heavy chain variable domain includes a histidine at any of the specific combinations of one or more amino acid positions in SEQ ID NO: 489 listed in Table 10; and a light chain variable domain that that is at least 90% (e.g., at least 92%, at least 94%, at least 96%, at least 98%, at least 99%, or 100%) identical to SEQ ID NO: 490, where the light chain variable domain includes a histidine at any of the specific combinations of one or more amino acid positions in SEQ ID NO: 490 listed in Table 11.

[0527] In some examples of any of the ABPCs described herein, the first antigen-binding domain comprises a light chain variable domain comprising SEQ ID NO: 490, and a heavy chain variable domain that is at least 90% identical (e.g., at least 92%, at least 94%, at least 96%, at least 98%, at least 99%, or 100%) identical to SEQ ID NO: 489, where the heavy chain variable domain includes a histidine at any of the specific combinations of one or more (e.g., two, three, four, five, six, seven, eight, nine, or ten) amino acid positions in SEQ ID NO: 489 listed in Table 10.

[0528] In some examples of any of the ABPCs described herein, the first antigen-binding domain comprises a light chain variable domain that is at least 90% identical to SEQ ID NO: 490, wherein the light chain variable domain includes a histidine at position 55 in SEQ ID NO: 490; and a heavy chain variable domain that is at least 90% (e.g., at least 92%, at least 94%, at least 96%, at least 98%, at least 99%, or 100%) identical to SEQ ID NO: 489, where the heavy chain variable domain includes a histidine at any of the specific combinations of one or more amino acid positions in SEQ ID NO: 489 listed in Table 10.

[0529] In some examples of any of the ABPCs described herein, the first antigen-binding domain comprises a light chain variable domain that is at least 90% identical to SEQ ID NO: 490, wherein the light chain variable domain includes a histidine at position 56 in SEQ ID NO: 490; and a heavy chain variable domain that is at least 90% (e.g., at least 92%, at least 94%, at least 96%, at least 98%, at least 99%, or 100%) identical to SEQ ID NO: 489, where the heavy chain variable domain includes a histidine at any of the specific combinations of one or more amino acid positions in SEQ ID NO: 489 listed in Table 10.

[0530] In some examples of any of the ABPCs described herein, the first antigen-binding domain includes a heavy chain variable domain of 19A3 with one or more (e.g., one, two, three, four, five, six, seven, eight, nine, ten, eleven, twelve, thirteen, fourteen, fifteen, sixteen, seventeen, eighteen, nineteen, or twenty) histidine(s) substituted with an alanine. In some examples of any of the ABPCs described herein, the first antigen-binding domain includes a light chain variable domain of 19A3 with one or more (e.g., one, two, three, four, five, six, seven, eight, nine, ten, eleven, twelve, thirteen, fourteen, fifteen, sixteen, seventeen, eighteen, nineteen, or twenty) histidine(s) substituted with an alanine. In some examples of any of the ABPCs described herein, the first antigen-binding domain includes a heavy chain variable domain of 19A3 with one or more (e.g., one, two, three, four, five, six, seven, eight, nine, ten, eleven, twelve, thirteen, fourteen, fifteen, sixteen, seventeen, eighteen, nineteen, or twenty) histidines substituted with an alanine; and a light chain variable domain of 19A3 with one or more (e.g., one, two, three, four, five, six, seven, eight, nine, ten, eleven, twelve, thirteen, fourteen, fifteen, sixteen, seventeen, eighteen, nineteen, or twenty) histidine(s) substituted with an alanine. In some examples of any of the ABPCs described herein, the heavy chain variable domain of 19A3 comprises SEQ ID NO: 489. In some examples of any of the ABPCs described herein, the light chain variable domain of 19A3 comprises SEQ ID NO: 490.

[0531] In some examples of any of the ABPCs described herein, the first antigen-binding domain comprises a heavy chain variable domain comprising a CDR1, a CDR2, and a CDR3 of SEQ ID NO: 491, SEQ ID NO: 492, and SEQ ID NO: 493, respectively, with collectively a total of one or more (e.g., one, two, three, four, five, six, seven, eight, nine, or ten) histidine(s) in SEQ ID NOs: 491-493 substituted with an alanine. In some examples of any of the ABPCs described herein, the first antigen-binding domain comprises a light chain variable domain comprising a CDR1, a CDR2, and a CDR3 of SEQ ID NO: 494, SEQ ID NO: 495, and SEQ ID NO: 496, respectively, with collectively a total of one or more (e.g., one, two, three, four, five, six, seven, eight, nine, or ten) histidine(s) in SEQ ID NOs: 494-496 substituted with an alanine. In some examples of any of the ABPCs described herein, the first antigen-binding domain includes: a heavy chain variable domain comprising a CDR1, a CDR2, and a CDR3 of SEQ ID NO: 491, SEQ ID NO: 492, and SEQ ID NO: 493, respectively, with collectively a total of one or more (e.g., one, two, three, four, five, six, seven, eight, nine, or ten) histidine(s) in SEQ ID NOs: 491-493 substituted with an alanine; and a light chain variable domain comprising a CDR1, a CDR2, and a CDR3 of SEQ ID NO: 494, SEQ ID NO: 495, and SEQ ID NO: 496, respectively, with collectively a total of one or more (e.g., one, two, three, four, five, six, seven, eight, nine, or ten) histidine(s) in SEQ ID NOs: 494-496 substituted with an alanine.

[0532] In some examples of any of the ABPCs described herein, the first antigen-binding domain comprises a heavy chain variable domain of SEQ ID NO: 489, SEQ ID NO: 497, SEQ ID NO: 498, SEQ ID NO: 499, SEQ ID NO: 500, SEQ ID NO: 501, SEQ ID NO: 502, SEQ ID NO: 503, SEQ ID NO: 504, SEQ ID NO: 505, SEQ ID NO: 506, SEQ ID NO: 507, SEQ ID NO: 508, SEQ ID NO: 509, SEQ ID NO: 510, SEQ ID NO: 511, SEQ ID NO: 512, SEQ ID NO: 513, SEQ ID NO: 514, SEQ ID NO: 515, SEQ ID NO: 516, SEQ ID NO: 517, SEQ ID NO: 518, SEQ ID NO: 519, SEQ ID NO: 520, SEQ ID NO: 521, SEQ ID NO: 522, SEQ ID NO: 523, SEQ ID NO: 524, SEQ ID NO: 525, SEQ ID NO: 526, SEQ ID NO: 527, SEQ ID NO: 528, SEQ ID NO: 529, SEQ ID NO: 530, SEQ ID NO: 531, SEQ ID NO: 532, SEQ ID NO: 533, SEQ ID NO: 534, SEQ ID NO: 535, SEQ ID NO: 536, SEQ ID NO: 537, SEQ ID NO: 538, SEQ ID NO: 539, SEQ ID NO: 540, or SEQ ID NO: 541.

[0533] In some examples of any of the ABPCs described herein, the first antigen-binding domain includes a light chain variable domain of SEQ ID NO: 490, SEQ ID NO: 542, SEQ ID NO: 543, SEQ ID NO: 544, SEQ ID NO: 545, SEQ ID NO: 546, SEQ ID NO: 547, SEQ ID NO: 548, SEQ ID NO: 549, SEQ ID NO: 550, SEQ ID NO: 551, SEQ ID NO: 552, SEQ ID NO: 553, SEQ ID NO: 554, SEQ ID NO: 555, SEQ ID NO: 556, SEQ ID NO: 557, SEQ ID NO: 558, SEQ ID NO: 559, SEQ ID NO: 560, SEQ ID NO: 561, SEQ ID NO: 562, SEQ ID NO: 563, SEQ ID NO: 564, SEQ ID NO: 565, SEQ ID NO: 566, or SEQ ID NO: 567.

[0534] In some examples of any of the ABPCs described herein, the first antigen-binding domain includes a light chain variable domain comprising SEQ ID NO: 490, and a heavy chain variable domain comprising: SEQ ID NO: 497, SEQ ID NO: 498, SEQ ID NO: 499, SEQ ID NO: 500, SEQ ID NO: 501, SEQ ID NO: 502, SEQ ID NO: 503, SEQ ID NO: 504, SEQ ID NO: 505, SEQ ID NO: 506, SEQ ID NO: 507, SEQ ID NO: 508, SEQ ID NO: 509, SEQ ID NO: 510, SEQ ID NO: 511, SEQ ID NO: 512, SEQ ID NO: 513, SEQ ID NO: 514, SEQ ID NO: 515, SEQ ID NO: 516, SEQ ID NO: 517, SEQ ID NO: 518, SEQ ID NO: 519, SEQ ID NO: 520, SEQ ID NO: 521, SEQ ID NO: 522, SEQ ID NO: 523, SEQ ID NO: 524, SEQ ID NO: 525, SEQ ID NO: 526, SEQ ID NO: 527, SEQ ID NO: 528, SEQ ID NO: 529, SEQ ID NO: 530, SEQ ID NO: 531, SEQ ID NO: 532, SEQ ID NO: 533, SEQ ID NO: 534, SEQ ID NO: 535, SEQ ID NO: 536, SEQ ID NO: 537, SEQ ID NO: 538, SEQ ID NO: 539, SEQ ID NO: 540, or SEQ ID NO: 541.

[0535] In some examples of any of the ABPCs described herein, the first antigen-binding domain includes a light chain variable domain comprising SEQ ID NO: 542, and a heavy chain variable domain comprising: SEQ ID NO: 489, SEQ ID NO: 497, SEQ ID NO: 498, SEQ ID NO: 499, SEQ ID NO: 500, SEQ ID NO: 501, SEQ ID NO: 502, SEQ ID NO: 503, SEQ ID NO: 504, SEQ ID NO: 505, SEQ ID NO: 506, SEQ ID NO: 507, SEQ ID NO: 508, SEQ ID NO: 509, SEQ ID NO: 510, SEQ ID NO: 511, SEQ ID NO: 512, SEQ ID NO: 513, SEQ ID NO: 514, SEQ ID NO: 515, SEQ ID NO: 516, SEQ ID NO: 517, SEQ ID NO: 518, SEQ ID NO: 519, SEQ ID NO: 520, SEQ ID NO: 521, SEQ ID NO: 522, SEQ ID NO: 523, SEQ ID NO: 524, SEQ ID NO: 525, SEQ ID NO: 526, SEQ ID NO: 527, SEQ ID NO: 528, SEQ ID NO: 529, SEQ ID NO: 530, SEQ ID NO: 531, SEQ ID NO: 532, SEQ ID NO: 533, SEQ ID NO: 534, SEQ ID NO: 535, SEQ ID NO: 536, SEQ ID NO: 537, SEQ ID NO: 538, SEQ ID NO: 539, SEQ ID NO: 540, or SEQ ID NO: 541.

[0536] In some examples of any of the ABPCs described herein, the first antigen-binding domain includes a light chain variable domain comprising SEQ ID NO: 543, and a heavy chain variable domain comprising: SEQ ID NO: 489, SEQ ID NO: 497, SEQ ID NO: 498, SEQ ID NO: 499, SEQ ID NO: 500, SEQ ID NO: 501, SEQ ID NO: 502, SEQ ID NO: 503, SEQ ID NO: 504, SEQ ID NO: 505, SEQ ID NO: 506, SEQ ID NO: 507, SEQ ID NO: 508, SEQ ID NO: 509, SEQ ID NO: 510, SEQ ID NO: 511, SEQ ID NO: 512, SEQ ID NO: 513, SEQ ID NO: 514, SEQ ID NO: 515, SEQ ID NO: 516, SEQ ID NO: 517, SEQ ID NO: 518, SEQ ID NO: 519, SEQ ID NO: 520, SEQ ID NO: 521, SEQ ID NO: 522, SEQ ID NO: 523, SEQ ID NO: 524, SEQ ID NO: 525, SEQ ID NO: 526, SEQ ID NO: 527, SEQ ID NO: 528, SEQ ID NO: 529, SEQ ID NO: 530, SEQ ID NO: 531, SEQ ID NO: 532, SEQ ID NO: 533, SEQ ID NO: 534, SEQ ID NO: 535, SEQ ID NO: 536, SEQ ID NO: 537, SEQ ID NO: 538, SEQ ID NO: 539, SEQ ID NO: 540, or SEQ ID NO: 541.

[0537] In some examples of any of the ABPCs described herein, the first antigen-binding domain includes a light chain variable domain comprising SEQ ID NO: 544, and a heavy chain variable domain comprising: SEQ ID NO: 489, SEQ ID NO: 497, SEQ ID NO: 498, SEQ ID NO: 499, SEQ ID NO: 500, SEQ ID NO: 501, SEQ ID NO: 502, SEQ ID NO: 503, SEQ ID NO: 504, SEQ ID NO: 505, SEQ ID NO: 506, SEQ ID NO: 507, SEQ ID NO: 508, SEQ ID NO: 509, SEQ ID NO: 510, SEQ ID NO: 511, SEQ ID NO: 512, SEQ ID NO: 513, SEQ ID NO: 514, SEQ ID NO: 515, SEQ ID NO: 516, SEQ ID NO: 517, SEQ ID NO: 518, SEQ ID NO: 519, SEQ ID NO: 520, SEQ ID NO: 521, SEQ ID NO: 522, SEQ ID NO: 523, SEQ ID NO: 524, SEQ ID NO: 525, SEQ ID NO: 526, SEQ ID NO: 527, SEQ ID NO: 528, SEQ ID NO: 529, SEQ ID NO: 530, SEQ ID NO: 531, SEQ ID NO: 532, SEQ ID NO: 533, SEQ ID NO: 534, SEQ ID NO: 535, SEQ ID NO: 536, SEQ ID NO: 537, SEQ ID NO: 538, SEQ ID NO: 539, SEQ ID NO: 540, or SEQ ID NO: 541.

[0538] In some examples of any of the ABPCs described herein, the first antigen-binding domain includes a light chain variable domain comprising SEQ ID NO: 545, and a heavy chain variable domain comprising: SEQ ID NO: 489, SEQ ID NO: 497, SEQ ID NO: 498, SEQ ID NO: 499, SEQ ID NO: 500, SEQ ID NO: 501, SEQ ID NO: 502, SEQ ID NO: 503, SEQ ID NO: 504, SEQ ID NO: 505, SEQ ID NO: 506, SEQ ID NO: 507, SEQ ID NO: 508, SEQ ID NO: 509, SEQ ID NO: 510, SEQ ID NO: 511, SEQ ID NO: 512, SEQ ID NO: 513, SEQ ID NO: 514, SEQ ID NO: 515, SEQ ID NO: 516, SEQ ID NO: 517, SEQ ID NO: 518, SEQ ID NO: 519, SEQ ID NO: 520, SEQ ID NO: 521, SEQ ID NO: 522, SEQ ID NO: 523, SEQ ID NO: 524, SEQ ID NO: 525, SEQ ID NO: 526, SEQ ID NO: 527, SEQ ID NO: 528, SEQ ID NO: 529, SEQ ID NO: 530, SEQ ID NO: 531, SEQ ID NO: 532, SEQ ID NO: 533, SEQ ID NO: 534, SEQ ID NO: 535, SEQ ID NO: 536, SEQ ID NO: 537, SEQ ID NO: 538, SEQ ID NO: 539, SEQ ID NO: 540, or SEQ ID NO: 541.

[0539] In some examples of any of the ABPCs described herein, the first antigen-binding domain includes a light chain variable domain comprising SEQ ID NO: 546, and a heavy chain variable domain comprising: SEQ ID NO: 489, SEQ ID NO: 497, SEQ ID NO: 498, SEQ ID NO: 499, SEQ ID NO: 500, SEQ ID NO: 501, SEQ ID NO: 502, SEQ ID NO: 503, SEQ ID NO: 504, SEQ ID NO: 505, SEQ ID NO: 506, SEQ ID NO: 507, SEQ ID NO: 508, SEQ ID NO: 509, SEQ ID NO: 510, SEQ ID NO: 511, SEQ ID NO: 512, SEQ ID NO: 513, SEQ ID NO: 514, SEQ ID NO: 515, SEQ ID NO: 516, SEQ ID NO: 517, SEQ ID NO: 518, SEQ ID NO: 519, SEQ ID NO: 520, SEQ ID NO: 521, SEQ ID NO: 522, SEQ ID NO: 523, SEQ ID NO: 524, SEQ ID NO: 525, SEQ ID NO: 526, SEQ ID NO: 527, SEQ ID NO: 528, SEQ ID NO: 529, SEQ ID NO: 530, SEQ ID NO: 531, SEQ ID NO: 532, SEQ ID NO: 533, SEQ ID NO: 534, SEQ ID NO: 535, SEQ ID NO: 536, SEQ ID NO: 537, SEQ ID NO: 538, SEQ ID NO: 539, SEQ ID NO: 540, or SEQ ID NO: 541.

[0540] In some examples of any of the ABPCs described herein, the first antigen-binding domain includes a light chain variable domain comprising SEQ ID NO: 547, and a heavy chain variable domain comprising: SEQ ID NO: 489, SEQ ID NO: 497, SEQ ID NO: 498, SEQ ID NO: 499, SEQ ID NO: 500, SEQ ID NO: 501, SEQ ID NO: 502, SEQ ID NO: 503, SEQ ID NO: 504, SEQ ID NO: 505, SEQ ID NO: 506, SEQ ID NO: 507, SEQ ID NO: 508, SEQ ID NO: 509, SEQ ID NO: 510, SEQ ID NO: 511, SEQ ID NO: 512, SEQ ID NO: 513, SEQ ID NO: 514, SEQ ID NO: 515, SEQ ID NO: 516, SEQ ID NO: 517, SEQ ID NO: 518, SEQ ID NO: 519, SEQ ID NO: 520, SEQ ID NO: 521, SEQ ID NO: 522, SEQ ID NO: 523, SEQ ID NO: 524, SEQ ID NO: 525, SEQ ID NO: 526, SEQ ID NO: 527, SEQ ID NO: 528, SEQ ID NO: 529, SEQ ID NO: 530, SEQ ID NO: 531, SEQ ID NO: 532, SEQ ID NO: 533, SEQ ID NO: 534, SEQ ID NO: 535, SEQ ID NO: 536, SEQ ID NO: 537, SEQ ID NO: 538, SEQ ID NO: 539, SEQ ID NO: 540, or SEQ ID NO: 541.

[0541] In some examples of any of the ABPCs described herein, the first antigen-binding domain includes a light chain variable domain comprising SEQ ID NO: 548, and a heavy chain variable domain comprising: SEQ ID NO: 489, SEQ ID NO: 497, SEQ ID NO: 498, SEQ ID NO: 499, SEQ ID NO: 500, SEQ ID NO: 501, SEQ ID NO: 502, SEQ ID NO: 503, SEQ ID NO: 504, SEQ ID NO: 505, SEQ ID NO: 506, SEQ ID NO: 507, SEQ ID NO: 508, SEQ ID NO: 509, SEQ ID NO: 510, SEQ ID NO: 511, SEQ ID NO: 512, SEQ ID NO: 513, SEQ ID NO: 514, SEQ ID NO: 515, SEQ ID NO: 516, SEQ ID NO: 517, SEQ ID NO: 518, SEQ ID NO: 519, SEQ ID NO: 520, SEQ ID NO: 521, SEQ ID NO: 522, SEQ ID NO: 523, SEQ ID NO: 524, SEQ ID NO: 525, SEQ ID NO: 526, SEQ ID NO: 527, SEQ ID NO: 528, SEQ ID NO: 529, SEQ ID NO: 530, SEQ ID NO: 531, SEQ ID NO: 532, SEQ ID NO: 533, SEQ ID NO: 534, SEQ ID NO: 535, SEQ ID NO: 536, SEQ ID NO: 537, SEQ ID NO: 538, SEQ ID NO: 539, SEQ ID NO: 540, or SEQ ID NO: 541.

[0542] In some examples of any of the ABPCs described herein, the first antigen-binding domain includes a light chain variable domain comprising SEQ ID NO: 549, and a heavy chain variable domain comprising: SEQ ID NO: 489, SEQ ID NO: 497, SEQ ID NO: 498, SEQ ID NO: 499, SEQ ID NO: 500, SEQ ID NO: 501, SEQ ID NO: 502, SEQ ID NO: 503, SEQ ID NO: 504, SEQ ID NO: 505, SEQ ID NO: 506, SEQ ID NO: 507, SEQ ID NO: 508, SEQ ID NO: 509, SEQ ID NO: 510, SEQ ID NO: 511, SEQ ID NO: 512, SEQ ID NO: 513, SEQ ID NO: 514, SEQ ID NO: 515, SEQ ID NO: 516, SEQ ID NO: 517, SEQ ID NO: 518, SEQ ID NO: 519, SEQ ID NO: 520, SEQ ID NO: 521, SEQ ID NO: 522, SEQ ID NO: 523, SEQ ID NO: 524, SEQ ID NO: 525, SEQ ID NO: 526, SEQ ID NO: 527, SEQ ID NO: 528, SEQ ID NO: 529, SEQ ID NO: 530, SEQ ID NO: 531, SEQ ID NO: 532, SEQ ID NO: 533, SEQ ID NO: 534, SEQ ID NO: 535, SEQ ID NO: 536, SEQ ID NO: 537, SEQ ID NO: 538, SEQ ID NO: 539, SEQ ID NO: 540, or SEQ ID NO: 541.

[0543] In some examples of any of the ABPCs described herein, the first antigen-binding domain includes a light chain variable domain comprising SEQ ID NO: 550, and a heavy chain variable domain comprising: SEQ ID NO: 489, SEQ ID NO: 497, SEQ ID NO: 498, SEQ ID NO: 499, SEQ ID NO: 500, SEQ ID NO: 501, SEQ ID NO: 502, SEQ ID NO: 503, SEQ ID NO: 504, SEQ ID NO: 505, SEQ ID NO: 506, SEQ ID NO: 507, SEQ ID NO: 508, SEQ ID NO: 509, SEQ ID NO: 510, SEQ ID NO: 511, SEQ ID NO: 512, SEQ ID NO: 513, SEQ ID NO: 514, SEQ ID NO: 515, SEQ ID NO: 516, SEQ ID NO: 517, SEQ ID NO: 518, SEQ ID NO: 519, SEQ ID NO: 520, SEQ ID NO: 521, SEQ ID NO: 522, SEQ ID NO: 523, SEQ ID NO: 524, SEQ ID NO: 525, SEQ ID NO: 526, SEQ ID NO: 527, SEQ ID NO: 528, SEQ ID NO: 529, SEQ ID NO: 530, SEQ ID NO: 531, SEQ ID NO: 532, SEQ ID NO: 533, SEQ ID NO: 534, SEQ ID NO: 535, SEQ ID NO: 536, SEQ ID NO: 537, SEQ ID NO: 538, SEQ ID NO: 539, SEQ ID NO: 540, or SEQ ID NO: 541.

[0544] In some examples of any of the ABPCs described herein, the first antigen-binding domain includes a light chain variable domain comprising SEQ ID NO: 551, and a heavy chain variable domain comprising: SEQ ID NO: 489, SEQ ID NO: 497, SEQ ID NO: 498, SEQ ID NO: 499, SEQ ID NO: 500, SEQ ID NO: 501, SEQ ID NO: 502, SEQ ID NO: 503, SEQ ID NO: 504, SEQ ID NO: 505, SEQ ID NO: 506, SEQ ID NO: 507, SEQ ID NO: 508, SEQ ID NO: 509, SEQ ID NO: 510, SEQ ID NO: 511, SEQ ID NO: 512, SEQ ID NO: 513, SEQ ID NO: 514, SEQ ID NO: 515, SEQ ID NO: 516, SEQ ID NO: 517, SEQ ID NO: 518, SEQ ID NO: 519, SEQ ID NO: 520, SEQ ID NO: 521, SEQ ID NO: 522, SEQ ID NO: 523, SEQ ID NO: 524, SEQ ID NO: 525, SEQ ID NO: 526, SEQ ID NO: 527, SEQ ID NO: 528, SEQ ID NO: 529, SEQ ID NO: 530, SEQ ID NO: 531, SEQ ID NO: 532, SEQ ID NO: 533, SEQ ID NO: 534, SEQ ID NO: 535, SEQ ID NO: 536, SEQ ID NO: 537, SEQ ID NO: 538, SEQ ID NO: 539, SEQ ID NO: 540, or SEQ ID NO: 541.

[0545] In some examples of any of the ABPCs described herein, the first antigen-binding domain includes a light chain variable domain comprising SEQ ID NO: 552, and a heavy chain variable domain comprising: SEQ ID NO: 489, SEQ ID NO: 497, SEQ ID NO: 498, SEQ ID NO: 499, SEQ ID NO: 500, SEQ ID NO: 501, SEQ ID NO: 502, SEQ ID NO: 503, SEQ ID NO: 504, SEQ ID NO: 505, SEQ ID NO: 506, SEQ ID NO: 507, SEQ ID NO: 508, SEQ ID NO: 509, SEQ ID NO: 510, SEQ ID NO: 511, SEQ ID NO: 512, SEQ ID NO: 513, SEQ ID NO: 514, SEQ ID NO: 515, SEQ ID NO: 516, SEQ ID NO: 517, SEQ ID NO: 518, SEQ ID NO: 519, SEQ ID NO: 520, SEQ ID NO: 521, SEQ ID NO: 522, SEQ ID NO: 523, SEQ ID NO: 524, SEQ ID NO: 525, SEQ ID NO: 526, SEQ ID NO: 527, SEQ ID NO: 528, SEQ ID NO: 529, SEQ ID NO: 530, SEQ ID NO: 531, SEQ ID NO: 532, SEQ ID NO: 533, SEQ ID NO: 534, SEQ ID NO: 535, SEQ ID NO: 536, SEQ ID NO: 537, SEQ ID NO: 538, SEQ ID NO: 539, SEQ ID NO: 540, or SEQ ID NO: 541.

[0546] In some examples of any of the ABPCs described herein, the first antigen-binding domain includes a light chain variable domain comprising SEQ ID NO: 553, and a heavy chain variable domain comprising: SEQ ID NO: 489, SEQ ID NO: 497, SEQ ID NO: 498, SEQ ID NO: 499, SEQ ID NO: 500, SEQ ID NO: 501, SEQ ID NO: 502, SEQ ID NO: 503, SEQ ID NO: 504, SEQ ID NO: 505, SEQ ID NO: 506, SEQ ID NO: 507, SEQ ID NO: 508, SEQ ID NO: 509, SEQ ID NO: 510, SEQ ID NO: 511, SEQ ID NO: 512, SEQ ID NO: 513, SEQ ID NO: 514, SEQ ID NO: 515, SEQ ID NO: 516, SEQ ID NO: 517, SEQ ID NO: 518, SEQ ID NO: 519, SEQ ID NO: 520, SEQ ID NO: 521, SEQ ID NO: 522, SEQ ID NO: 523, SEQ ID NO: 524, SEQ ID NO: 525, SEQ ID NO: 526, SEQ ID NO: 527, SEQ ID NO: 528, SEQ ID NO: 529, SEQ ID NO: 530, SEQ ID NO: 531, SEQ ID NO: 532, SEQ ID NO: 533, SEQ ID NO: 534, SEQ ID NO: 535, SEQ ID NO: 536, SEQ ID NO: 537, SEQ ID NO: 538, SEQ ID NO: 539, SEQ ID NO: 540, or SEQ ID NO: 541.

[0547] In some examples of any of the ABPCs described herein, the first antigen-binding domain includes a light chain variable domain comprising SEQ ID NO: 554, and a heavy chain variable domain comprising: SEQ ID NO: 489, SEQ ID NO: 497, SEQ ID NO: 498, SEQ ID NO: 499, SEQ ID NO: 500, SEQ ID NO: 501, SEQ ID NO: 502, SEQ ID NO: 503, SEQ ID NO: 504, SEQ ID NO: 505, SEQ ID NO: 506, SEQ ID NO: 507, SEQ ID NO: 508, SEQ ID NO: 509, SEQ ID NO: 510, SEQ ID NO: 511, SEQ ID NO: 512, SEQ ID NO: 513, SEQ ID NO: 514, SEQ ID NO: 515, SEQ ID NO: 516, SEQ ID NO: 517, SEQ ID NO: 518, SEQ ID NO: 519, SEQ ID NO: 520, SEQ ID NO: 521, SEQ ID NO: 522, SEQ ID NO: 523, SEQ ID NO: 524, SEQ ID NO: 525, SEQ ID NO: 526, SEQ ID NO: 527, SEQ ID NO: 528, SEQ ID NO: 529, SEQ ID NO: 530, SEQ ID NO: 531, SEQ ID NO: 532, SEQ ID NO: 533, SEQ ID NO: 534, SEQ ID NO: 535, SEQ ID NO: 536, SEQ ID NO: 537, SEQ ID NO: 538, SEQ ID NO: 539, SEQ ID NO: 540, or SEQ ID NO: 541.

[0548] In some examples of any of the ABPCs described herein, the first antigen-binding domain includes a light chain variable domain comprising SEQ ID NO: 555, and a heavy chain variable domain comprising: SEQ ID NO: 489, SEQ ID NO: 497, SEQ ID NO: 498, SEQ ID NO: 499, SEQ ID NO: 500, SEQ ID NO: 501, SEQ ID NO: 502, SEQ ID NO: 503, SEQ ID NO: 504, SEQ ID NO: 505, SEQ ID NO: 506, SEQ ID NO: 507, SEQ ID NO: 508, SEQ ID NO: 509, SEQ ID NO: 510, SEQ ID NO: 511, SEQ ID NO: 512, SEQ ID NO: 513, SEQ ID NO: 514, SEQ ID NO: 515, SEQ ID NO: 516, SEQ ID NO: 517, SEQ ID NO: 518, SEQ ID NO: 519, SEQ ID NO: 520, SEQ ID NO: 521, SEQ ID NO: 522, SEQ ID NO: 523, SEQ ID NO: 524, SEQ ID NO: 525, SEQ ID NO: 526, SEQ ID NO: 527, SEQ ID NO: 528, SEQ ID NO: 529, SEQ ID NO: 530, SEQ ID NO: 531, SEQ ID NO: 532, SEQ ID NO: 533, SEQ ID NO: 534, SEQ ID NO: 535, SEQ ID NO: 536, SEQ ID NO: 537, SEQ ID NO: 538, SEQ ID NO: 539, SEQ ID NO: 540, or SEQ ID NO: 541.

[0549] In some examples of any of the ABPCs described herein, the first antigen-binding domain includes a light chain variable domain comprising SEQ ID NO: 556, and a heavy chain variable domain comprising: SEQ ID NO: 489, SEQ ID NO: 497, SEQ ID NO: 498, SEQ ID NO: 499, SEQ ID NO: 500, SEQ ID NO: 501, SEQ ID NO: 502, SEQ ID NO: 503, SEQ ID NO: 504, SEQ ID NO: 505, SEQ ID NO: 506, SEQ ID NO: 507, SEQ ID NO: 508, SEQ ID NO: 509, SEQ ID NO: 510, SEQ ID NO: 511, SEQ ID NO: 512, SEQ ID NO: 513, SEQ ID NO: 514, SEQ ID NO: 515, SEQ ID NO: 516, SEQ ID NO: 517, SEQ ID NO: 518, SEQ ID NO: 519, SEQ ID NO: 520, SEQ ID NO: 521, SEQ ID NO: 522, SEQ ID NO: 523, SEQ ID NO: 524, SEQ ID NO: 525, SEQ ID NO: 526, SEQ ID NO: 527, SEQ ID NO: 528, SEQ ID NO: 529, SEQ ID NO: 530, SEQ ID NO: 531, SEQ ID NO: 532, SEQ ID NO: 533, SEQ ID NO: 534, SEQ ID NO: 535, SEQ ID NO: 536, SEQ ID NO: 537, SEQ ID NO: 538, SEQ ID NO: 539, SEQ ID NO: 540, or SEQ ID NO: 541.

[0550] In some examples of any of the ABPCs described herein, the first antigen-binding domain includes a light chain variable domain comprising SEQ ID NO: 557, and a heavy chain variable domain comprising: SEQ ID NO: 489, SEQ ID NO: 497, SEQ ID NO: 498, SEQ ID NO: 499, SEQ ID NO: 500, SEQ ID NO: 501, SEQ ID NO: 502, SEQ ID NO: 503, SEQ ID NO: 504, SEQ ID NO: 505, SEQ ID NO: 506, SEQ ID NO: 507, SEQ ID NO: 508, SEQ ID NO: 509, SEQ ID NO: 510, SEQ ID NO: 511, SEQ ID NO: 512, SEQ ID NO: 513, SEQ ID NO: 514, SEQ ID NO: 515, SEQ ID NO: 516, SEQ ID NO: 517, SEQ ID NO: 518, SEQ ID NO: 519, SEQ ID NO: 520, SEQ ID NO: 521, SEQ ID NO: 522, SEQ ID NO: 523, SEQ ID NO: 524, SEQ ID NO: 525, SEQ ID NO: 526, SEQ ID NO: 527, SEQ ID NO: 528, SEQ ID NO: 529, SEQ ID NO: 530, SEQ ID NO: 531, SEQ ID NO: 532, SEQ ID NO: 533, SEQ ID NO: 534, SEQ ID NO: 535, SEQ ID NO: 536, SEQ ID NO: 537, SEQ ID NO: 538, SEQ ID NO: 539, SEQ ID NO: 540, or SEQ ID NO: 541.

[0551] In some examples of any of the ABPCs described herein, the first antigen-binding domain includes a light chain variable domain comprising SEQ ID NO: 558, and a heavy chain variable domain comprising: SEQ ID NO: 489, SEQ ID NO: 497, SEQ ID NO: 498, SEQ ID NO: 499, SEQ ID NO: 500, SEQ ID NO: 501, SEQ ID NO: 502, SEQ ID NO: 503, SEQ ID NO: 504, SEQ ID NO: 505, SEQ ID NO: 506, SEQ ID NO: 507, SEQ ID NO: 508, SEQ ID NO: 509, SEQ ID NO: 510, SEQ ID NO: 511, SEQ ID NO: 512, SEQ ID NO: 513, SEQ ID NO: 514, SEQ ID NO: 515, SEQ ID NO: 516, SEQ ID NO: 517, SEQ ID NO: 518, SEQ ID NO: 519, SEQ ID NO: 520, SEQ ID NO: 521, SEQ ID NO: 522, SEQ ID NO: 523, SEQ ID NO: 524, SEQ ID NO: 525, SEQ ID NO: 526, SEQ ID NO: 527, SEQ ID NO: 528, SEQ ID NO: 529, SEQ ID NO: 530, SEQ ID NO: 531, SEQ ID NO: 532, SEQ ID NO: 533, SEQ ID NO: 534, SEQ ID NO: 535, SEQ ID NO: 536, SEQ ID NO: 537, SEQ ID NO: 538, SEQ ID NO: 539, SEQ ID NO: 540, or SEQ ID NO: 541.

[0552] In some examples of any of the ABPCs described herein, the first antigen-binding domain includes a light chain variable domain comprising SEQ ID NO: 559, and a heavy chain variable domain comprising: SEQ ID NO: 489, SEQ ID NO: 497, SEQ ID NO: 498, SEQ ID NO: 499, SEQ ID NO: 500, SEQ ID NO: 501, SEQ ID NO: 502, SEQ ID NO: 503, SEQ ID NO: 504, SEQ ID NO: 505, SEQ ID NO: 506, SEQ ID NO: 507, SEQ ID NO: 508, SEQ ID NO: 509, SEQ ID NO: 510, SEQ ID NO: 511, SEQ ID NO: 512, SEQ ID NO: 513, SEQ ID NO: 514, SEQ ID NO: 515, SEQ ID NO: 516, SEQ ID NO: 517, SEQ ID NO: 518, SEQ ID NO: 519, SEQ ID NO: 520, SEQ ID NO: 521, SEQ ID NO: 522, SEQ ID NO: 523, SEQ ID NO: 524, SEQ ID NO: 525, SEQ ID NO: 526, SEQ ID NO: 527, SEQ ID NO: 528, SEQ ID NO: 529, SEQ ID NO: 530, SEQ ID NO: 531, SEQ ID NO: 532, SEQ ID NO: 533, SEQ ID NO: 534, SEQ ID NO: 535, SEQ ID NO: 536, SEQ ID NO: 537, SEQ ID NO: 538, SEQ ID NO: 539, SEQ ID NO: 540, or SEQ ID NO: 541.

[0553] In some examples of any of the ABPCs described herein, the first antigen-binding domain includes a light chain variable domain comprising SEQ ID NO: 560, and a heavy chain variable domain comprising: SEQ ID NO: 489, SEQ ID NO: 497, SEQ ID NO: 498, SEQ ID NO: 499, SEQ ID NO: 500, SEQ ID NO: 501, SEQ ID NO: 502, SEQ ID NO: 503, SEQ ID NO: 504, SEQ ID NO: 505, SEQ ID NO: 506, SEQ ID NO: 507, SEQ ID NO: 508, SEQ ID NO: 509, SEQ ID NO: 510, SEQ ID NO: 511, SEQ ID NO: 512, SEQ ID NO: 513, SEQ ID NO: 514, SEQ ID NO: 515, SEQ ID NO: 516, SEQ ID NO: 517, SEQ ID NO: 518, SEQ ID NO: 519, SEQ ID NO: 520, SEQ ID NO: 521, SEQ ID NO: 522, SEQ ID NO: 523, SEQ ID NO: 524, SEQ ID NO: 525, SEQ ID NO: 526, SEQ ID NO: 527, SEQ ID NO: 528, SEQ ID NO: 529, SEQ ID NO: 530, SEQ ID NO: 531, SEQ ID NO: 532, SEQ ID NO: 533, SEQ ID NO: 534, SEQ ID NO: 535, SEQ ID NO: 536, SEQ ID NO: 537, SEQ ID NO: 538, SEQ ID NO: 539, SEQ ID NO: 540, or SEQ ID NO: 541.

[0554] In some examples of any of the ABPCs described herein, the first antigen-binding domain includes a light chain variable domain comprising SEQ ID NO: 561, and a heavy chain variable domain comprising: SEQ ID NO: 489, SEQ ID NO: 497, SEQ ID NO: 498, SEQ ID NO: 499, SEQ ID NO: 500, SEQ ID NO: 501, SEQ ID NO: 502, SEQ ID NO: 503, SEQ ID NO: 504, SEQ ID NO: 505, SEQ ID NO: 506, SEQ ID NO: 507, SEQ ID NO: 508, SEQ ID NO: 509, SEQ ID NO: 510, SEQ ID NO: 511, SEQ ID NO: 512, SEQ ID NO: 513, SEQ ID NO: 514, SEQ ID NO: 515, SEQ ID NO: 516, SEQ ID NO: 517, SEQ ID NO: 518, SEQ ID NO: 519, SEQ ID NO: 520, SEQ ID NO: 521, SEQ ID NO: 522, SEQ ID NO: 523, SEQ ID NO: 524, SEQ ID NO: 525, SEQ ID NO: 526, SEQ ID NO: 527, SEQ ID NO: 528, SEQ ID NO: 529, SEQ ID NO: 530, SEQ ID NO: 531, SEQ ID NO: 532, SEQ ID NO: 533, SEQ ID NO: 534, SEQ ID NO: 535, SEQ ID NO: 536, SEQ ID NO: 537, SEQ ID NO: 538, SEQ ID NO: 539, SEQ ID NO: 540, or SEQ ID NO: 541.

[0555] In some examples of any of the ABPCs described herein, the first antigen-binding domain includes a light chain variable domain comprising SEQ ID NO: 562, and a heavy chain variable domain comprising: SEQ ID NO: 489, SEQ ID NO: 497, SEQ ID NO: 498, SEQ ID NO: 499, SEQ ID NO: 500, SEQ ID NO: 501, SEQ ID NO: 502, SEQ ID NO: 503, SEQ ID NO: 504, SEQ ID NO: 505, SEQ ID NO: 506, SEQ ID NO: 507, SEQ ID NO: 508, SEQ ID NO: 509, SEQ ID NO: 510, SEQ ID NO: 511, SEQ ID NO: 512, SEQ ID NO: 513, SEQ ID NO: 514, SEQ ID NO: 515, SEQ ID NO: 516, SEQ ID NO: 517, SEQ ID NO: 518, SEQ ID NO: 519, SEQ ID NO: 520, SEQ ID NO: 521, SEQ ID NO: 522, SEQ ID NO: 523, SEQ ID NO: 524, SEQ ID NO: 525, SEQ ID NO: 526, SEQ ID NO: 527, SEQ ID NO: 528, SEQ ID NO: 529, SEQ ID NO: 530, SEQ ID NO: 531, SEQ ID NO: 532, SEQ ID NO: 533, SEQ ID NO: 534, SEQ ID NO: 535, SEQ ID NO: 536, SEQ ID NO: 537, SEQ ID NO: 538, SEQ ID NO: 539, SEQ ID NO: 540, or SEQ ID NO: 541.

[0556] In some examples of any of the ABPCs described herein, the first antigen-binding domain includes a light chain variable domain comprising SEQ ID NO: 563, and a heavy chain variable domain comprising: SEQ ID NO: 489, SEQ ID NO: 497, SEQ ID NO: 498, SEQ ID NO: 499, SEQ ID NO: 500, SEQ ID NO: 501, SEQ ID NO: 502, SEQ ID NO: 503, SEQ ID NO: 504, SEQ ID NO: 505, SEQ ID NO: 506, SEQ ID NO: 507, SEQ ID NO: 508, SEQ ID NO: 509, SEQ ID NO: 510, SEQ ID NO: 511, SEQ ID NO: 512, SEQ ID NO: 513, SEQ ID NO: 514, SEQ ID NO: 515, SEQ ID NO: 516, SEQ ID NO: 517, SEQ ID NO: 518, SEQ ID NO: 519, SEQ ID NO: 520, SEQ ID NO: 521, SEQ ID NO: 522, SEQ ID NO: 523, SEQ ID NO: 524, SEQ ID NO: 525, SEQ ID NO: 526, SEQ ID NO: 527, SEQ ID NO: 528, SEQ ID NO: 529, SEQ ID NO: 530, SEQ ID NO: 531, SEQ ID NO: 532, SEQ ID NO: 533, SEQ ID NO: 534, SEQ ID NO: 535, SEQ ID NO: 536, SEQ ID NO: 537, SEQ ID NO: 538, SEQ ID NO: 539, SEQ ID NO: 540, or SEQ ID NO: 541.

[0557] In some examples of any of the ABPCs described herein, the first antigen-binding domain includes a light chain variable domain comprising SEQ ID NO: 564, and a heavy chain variable domain comprising: SEQ ID NO: 489, SEQ ID NO: 497, SEQ ID NO: 498, SEQ ID NO: 499, SEQ ID NO: 500, SEQ ID NO: 501, SEQ ID NO: 502, SEQ ID NO: 503, SEQ ID NO: 504, SEQ ID NO: 505, SEQ ID NO: 506, SEQ ID NO: 507, SEQ ID NO: 508, SEQ ID NO: 509, SEQ ID NO: 510, SEQ ID NO: 511, SEQ ID NO: 512, SEQ ID NO: 513, SEQ ID NO: 514, SEQ ID NO: 515, SEQ ID NO: 516, SEQ ID NO: 517, SEQ ID NO: 518, SEQ ID NO: 519, SEQ ID NO: 520, SEQ ID NO: 521, SEQ ID NO: 522, SEQ ID NO: 523, SEQ ID NO: 524, SEQ ID NO: 525, SEQ ID NO: 526, SEQ ID NO: 527, SEQ ID NO: 528, SEQ ID NO: 529, SEQ ID NO: 530, SEQ ID NO: 531, SEQ ID NO: 532, SEQ ID NO: 533, SEQ ID NO: 534, SEQ ID NO: 535, SEQ ID NO: 536, SEQ ID NO: 537, SEQ ID NO: 538, SEQ ID NO: 539, SEQ ID NO: 540, or SEQ ID NO: 541.

[0558] In some examples of any of the ABPCs described herein, the first antigen-binding domain includes a light chain variable domain comprising SEQ ID NO: 565, and a heavy chain variable domain comprising: SEQ ID NO: 489, SEQ ID NO: 497, SEQ ID NO: 498, SEQ ID NO: 499, SEQ ID NO: 500, SEQ ID NO: 501, SEQ ID NO: 502, SEQ ID NO: 503, SEQ ID NO: 504, SEQ ID NO: 505, SEQ ID NO: 506, SEQ ID NO: 507, SEQ ID NO: 508, SEQ ID NO: 509, SEQ ID NO: 510, SEQ ID NO: 511, SEQ ID NO: 512, SEQ ID NO: 513, SEQ ID NO: 514, SEQ ID NO: 515, SEQ ID NO: 516, SEQ ID NO: 517, SEQ ID NO: 518, SEQ ID NO: 519, SEQ ID NO: 520, SEQ ID NO: 521, SEQ ID NO: 522, SEQ ID NO: 523, SEQ ID NO: 524, SEQ ID NO: 525, SEQ ID NO: 526, SEQ ID NO: 527, SEQ ID NO: 528, SEQ ID NO: 529, SEQ ID NO: 530, SEQ ID NO: 531, SEQ ID NO: 532, SEQ ID NO: 533, SEQ ID NO: 534, SEQ ID NO: 535, SEQ ID NO: 536, SEQ ID NO: 537, SEQ ID NO: 538, SEQ ID NO: 539, SEQ ID NO: 540, or SEQ ID NO: 541.

[0559] In some examples of any of the ABPCs described herein, the first antigen-binding domain includes a light chain variable domain comprising SEQ ID NO: 566, and a heavy chain variable domain comprising: SEQ ID NO: 489, SEQ ID NO: 497, SEQ ID NO: 498, SEQ ID NO: 499, SEQ ID NO: 500, SEQ ID NO: 501, SEQ ID NO: 502, SEQ ID NO: 503, SEQ ID NO: 504, SEQ ID NO: 505, SEQ ID NO: 506, SEQ ID NO: 507, SEQ ID NO: 508, SEQ ID NO: 509, SEQ ID NO: 510, SEQ ID NO: 511, SEQ ID NO: 512, SEQ ID NO: 513, SEQ ID NO: 514, SEQ ID NO: 515, SEQ ID NO: 516, SEQ ID NO: 517, SEQ ID NO: 518, SEQ ID NO: 519, SEQ ID NO: 520, SEQ ID NO: 521, SEQ ID NO: 522, SEQ ID NO: 523, SEQ ID NO: 524, SEQ ID NO: 525, SEQ ID NO: 526, SEQ ID NO: 527, SEQ ID NO: 528, SEQ ID NO: 529, SEQ ID NO: 530, SEQ ID NO: 531, SEQ ID NO: 532, SEQ ID NO: 533, SEQ ID NO: 534, SEQ ID NO: 535, SEQ ID NO: 536, SEQ ID NO: 537, SEQ ID NO: 538, SEQ ID NO: 539, SEQ ID NO: 540, or SEQ ID NO: 541.

[0560] In some examples of any of the ABPCs described herein, the first antigen-binding domain includes a light chain variable domain comprising SEQ ID NO: 567, and a heavy chain variable domain comprising: SEQ ID NO: 489, SEQ ID NO: 497, SEQ ID NO: 498, SEQ ID NO: 499, SEQ ID NO: 500, SEQ ID NO: 501, SEQ ID NO: 502, SEQ ID NO: 503, SEQ ID NO: 504, SEQ ID NO: 505, SEQ ID NO: 506, SEQ ID NO: 507, SEQ ID NO: 508, SEQ ID NO: 509, SEQ ID NO: 510, SEQ ID NO: 511, SEQ ID NO: 512, SEQ ID NO: 513, SEQ ID NO: 514, SEQ ID NO: 515, SEQ ID NO: 516, SEQ ID NO: 517, SEQ ID NO: 518, SEQ ID NO: 519, SEQ ID NO: 520, SEQ ID NO: 521, SEQ ID NO: 522, SEQ ID NO: 523, SEQ ID NO: 524, SEQ ID NO: 525, SEQ ID NO: 526, SEQ ID NO: 527, SEQ ID NO: 528, SEQ ID NO: 529, SEQ ID NO: 530, SEQ ID NO: 531, SEQ ID NO: 532, SEQ ID NO: 533, SEQ ID NO: 534, SEQ ID NO: 535, SEQ ID NO: 536, SEQ ID NO: 537, SEQ ID NO: 538, SEQ ID NO: 539, SEQ ID NO: 540, or SEQ ID NO: 541.

[0561] Also provided herein are pharmaceutical compositions including any of the ABPCs described herein. Also provided herein are methods of treating a subject in need thereof that include administering a therapeutically effective amount of any of the ABPCs described herein to the subject.

[0562] In some examples of any of the ABPCs described herein, a composition including the ABPC (e.g., any of the ABPCs described herein) can provide for an increase (e.g., a detectable increase) (e.g., at least a 1% increase, at least a 2% increase, at least a 5% increase, at least a 10% increase, at least a 15% increase, at least a 20% increase, at least a 25% increase, at least a 30% increase, at least a 35% increase, at least a 40% increase, at least a 45% increase, at least a 50% increase, at least a 55% increase, at least a 60% increase, at least a 65% increase, at least a 70% increase, at least a 75% increase, at least a 80% increase, at least a 85% increase, at least a 90% increase, at least a 95% increase, at least a 100% increase, at least a 120% increase, at least a 140% increase, at least a 160% increase, at least a 180% increase, at least a 200% increase, at least a 250% increase, at least a 300% increase, at least a 350% increase, at least a 400% increase, at least a 450% increase, at least a 500% increase, at least a 1,000% increase, at least a 2,000% increase, at least a 3,000% increase, at least a 4,000% increase, at least a 5,000% increase, at least a 6,000% increase, at least a 7,000% increase, at least a 8,000% increase, at a least a 9,000% increase, or at least a 10,000% increase, or about a 1% increase to about 10,000% increase, about a 1% increase to about a 9,000% increase, about a 1% increase to about a 8,000% increase, about a 1% increase to about a 7,000% increase, about a 1% increase to about a 6,000% increase, about a 1% increase to about a 5,000% increase, about a 1% increase to about a 4,000% increase, about a 1% increase to about a 3,000% increase, about a 1% increase to about a 2,000% increase, about a 1% increase to about a 1,000% increase, about a 1% increase to about a 500% increase, about a 1% increase to about a 450% increase, about a 1% increase to about a 400% increase, about a 1% increase to about a 350% increase, about a 1% increase to about a 300% increase, about a 1% increase to about a 250% increase, about a 1% increase to about a 200% increase, about a 1% increase to about a 180% increase, about a 1% increase to about a 160% increase, about a 1% increase to about a 140% increase, about a 1% increase to about a 120% increase, about a 1% increase to about a 100% increase, about a 1% increase to about a 95% increase, about a 1% increase to about a 90% increase, about a 1% increase to about a 85% increase, about a 1% increase to about a 80% increase, about a 1% increase to about a 75% increase, about a 1% increase to about a 70% increase, about a 1% increase to about a 65% increase, about a 1% increase to about a 60% increase, about a 1% increase to about a 55% increase, about a 1% increase to about a 50% increase, about a 1% increase to about a 45% increase, about a 1% increase to about a 40% increase, about a 1% increase to about a 35% increase, about a 1% increase to about a 25% increase, about a 1% increase to about a 20% increase, about a 1% increase to about a 15% increase, about a 1% increase to about a 10% increase, about a 1% increase to about a 5% increase, about a 2% increase to about 10,000% increase, about a 2% increase to about a 9,000% increase, about a 2% increase to about a 8,000% increase, about a 2% increase to about a 7,000% increase, about a 2% increase to about a 6,000% increase, about a 2% increase to about a 5,000% increase, about a 2% increase to about a 4,000% increase, about a 2% increase to about a 3,000% increase, about a 2% increase to about a 2,000% increase, about a 2% increase to about a 1,000% increase, about a 2% increase to about a 500% increase, about a 2% increase to about a 450% increase, about a 2% increase to about a 400% increase, about a 2% increase to about a 350% increase, about a 2% increase to about a 300% increase, about a 2% increase to about a 250% increase, about a 2% increase to about a 200% increase, about a 2% increase to about a 180% increase, about a 2% increase to about a 160% increase, about a 2% increase to about a 140% increase, about a 2% increase to about a 120% increase, about a 2% increase to about a 100% increase, about a 2% increase to about a 95% increase, about a 2% increase to about a 90% increase, about a 2% increase to about a 85% increase, about a 2% increase to about a 80% increase, about a 2% increase to about a 75% increase, about a 2% increase to about a 70% increase, about a 2% increase to about a 65% increase, about a 2% increase to about a 60% increase, about a 2% increase to about a 55% increase, about a 2% increase to about a 50% increase, about a 2% increase to about a 45% increase, about a 2% increase to about a 40% increase, about a 2% increase to about a 35% increase, about a 2% increase to about a 25% increase, about a 2% increase to about a 20% increase, about a 2% increase to about a 15% increase, about a 2% increase to about a 10% increase, about a 2% increase to about a 5% increase, about a 5% increase to about 10,000% increase, about a 5% increase to about a 9,000% increase, about a 5% increase to about a 8,000% increase, about a 5% increase to about a 7,000% increase, about a 5% increase to about a 6,000% increase, about a 5% increase to about a 5,000% increase, about a 5% increase to about a 4,000% increase, about a 5% increase to about a 3,000% increase, about a 5% increase to about a 2,000% increase, about a 5% increase to about a 1,000% increase, about a 5% increase to about a 500% increase, about a 5% increase to about a 450% increase, about a 5% increase to about a 400% increase, about a 5% increase to about a 350% increase, about a 5% increase to about a 300% increase, about a 5% increase to about a 250% increase, about a 5% increase to about a 200% increase, about a 5% increase to about a 180% increase, about a 5% increase to about a 160% increase, about a 5% increase to about a 140% increase, about a 5% increase to about a 120% increase, about a 5% increase to about a 100% increase, about a 5% increase to about a 95% increase, about a 5% increase to about a 90% increase, about a 5% increase to about a 85% increase, about a 5% increase to about a 80% increase, about a 5% increase to about a 75% increase, about a 5% increase to about a 70% increase, about a 5% increase to about a 65% increase, about a 5% increase to about a 60% increase, about a 5% increase to about a 55% increase, about a 5% increase to about a 50% increase, about a 5% increase to about a 45% increase, about a 5% increase to about a 40% increase, about a 5% increase to about a 35% increase, about a 5% increase to about a 25% increase, about a 5% increase to about a 20% increase, about a 5% increase to about a 15% increase, about a 5% increase to about a 10% increase, about a 10% increase to about 10,000% increase, about a 10% increase to about a 9,000% increase, about a 10% increase to about a 8,000% increase, about a 10% increase to about a 7,000% increase, about a 10% increase to about a 6,000% increase, about a 10% increase to about a 5,000% increase, about a 10% increase to about a 4,000% increase, about a 10% increase to about a 3,000% increase, about a 10% increase to about a 2,000% increase, about a 10% increase to about a 1,000% increase, about a 10% increase to about a 500% increase, about a 10% increase to about a 450% increase, about a 10% increase to about a 400% increase, about a 10% increase to about a 350% increase, about a 10% increase to about a 300% increase, about a 10% increase to about a 250% increase, about a 10% increase to about a 200% increase, about a 10% increase to about a 180% increase, about a 10% increase to about a 160% increase, about a 10% increase to about a 140% increase, about a 10% increase to about a 120% increase, about a 10% increase to about a 100% increase, about a 10% increase to about a 95% increase, about a 10% increase to about a 90% increase, about a 10% increase to about a 85% increase, about a 10% increase to about a 80% increase, about a 10% increase to about a 75% increase, about a 10% increase to about a 70% increase, about a 10% increase to about a 65% increase, about a 10% increase to about a 60% increase, about a 10% increase to about a 55% increase, about a 10% increase to about a 50% increase, about a 10% increase to about a 45% increase, about a 10% increase to about a 40% increase, about a 10% increase to about a 35% increase, about a 10% increase to about a 30% increase, about a 10% increase to about a 25% increase, about a 10% increase to about a 20% increase, about a 10% increase to about a 15% increase, about a 15% increase to about 10,000% increase, about a 15% increase to about a 9,000% increase, about a 15% increase to about a 8,000% increase, about a 15% increase to about a 7,000% increase, about a 15% increase to about a 6,000% increase, about a 15% increase to about a 5,000% increase, about a 15% increase to about a 4,000% increase, about a 15% increase to about a 3,000% increase, about a 15% increase to about a 2,000% increase, about a 15% increase to about a 1,000% increase, about a 15% increase to about a 500% increase, about a 15% increase to about a 450% increase, about a 15% increase to about a 400% increase, about a 15% increase to about a 350% increase, about a 15% increase to about a 300% increase, about a 15% increase to about a 250% increase, about a 15% increase to about a 200% increase, about a 15% increase to about a 180% increase, about a 15% increase to about a 160% increase, about a 15% increase to about a 140% increase, about a 15% increase to about a 120% increase, about a 15% increase to about a 100% increase, about a 15% increase to about a 95% increase, about a 15% increase to about a 90% increase, about a 15% increase to about a 85% increase, about a 15% increase to about a 80% increase, about a 15% increase to about a 75% increase, about a 15% increase to about a 70% increase, about a 15% increase to about a 65% increase, about a 15% increase to about a 60% increase, about a 15% increase to about a 55% increase, about a 15% increase to about a 50% increase, about a 15% increase to about a 45% increase, about a 15% increase to about a 40% increase, about a 15% increase to about a 35% increase, about a 15% increase to about a 30% increase, about a 15% increase to about a 25% increase, about a 15% increase to about a 20% increase, about a 20% increase to about 10,000% increase, about a 20% increase to about a 9,000% increase, about a 20% increase to about a 8,000% increase, about a 20% increase to about a 7,000% increase, about a 20% increase to about a 6,000% increase, about a 20% increase to about a 5,000% increase, about a 20% increase to about a 4,000% increase, about a 20% increase to about a 3,000% increase, about a 20% increase to about a 2,000% increase, about a 20% increase to about a 1,000% increase, about a 20% increase to about a 500% increase, about a 20% increase to about a 450% increase, about a 20% increase to about a 400% increase, about a 20% increase to about a 350% increase, about a 20% increase to about a 300% increase, about a 20% increase to about a 250% increase, about a 20% increase to about a 200% increase, about a 20% increase to about a 180% increase, about a 20% increase to about a 160% increase, about a 20% increase to about a 140% increase, about a 20% increase to about a 120% increase, about a 20% increase to about a 100% increase, about a 20% increase to about a 95% increase, about a 20% increase to about a 90% increase, about a 20% increase to about a 85% increase, about a 20% increase to about a 80% increase, about a 20% increase to about a 75% increase, about a 20% increase to about a 70% increase, about a 20% increase to about a 65% increase, about a 20% increase to about a 60% increase, about a 20% increase to about a 55% increase, about a 20% increase to about a 50% increase, about a 20% increase to about a 45% increase, about a 20% increase to about a 40% increase, about a 20% increase to about a 35% increase, about a 20% increase to about a 30% increase, about a 20% increase to about a 25% increase, about a 25% increase to about 10,000% increase, about a 25% increase to about a 9,000% increase, about a 25% increase to about a 8,000% increase, about a 25% increase to about a 7,000% increase, about a 25% increase to about a 6,000% increase, about a 25% increase to about a 5,000% increase, about a 25% increase to about a 4,000% increase, about a 25% increase to about a 3,000% increase, about a 25% increase to about a 2,000% increase, about a 25% increase to about a 1,000% increase, about a 25% increase to about a 500% increase, about a 25% increase to about a 450% increase, about a 25% increase to about a 400% increase, about a 25% increase to about a 350% increase, about a 25% increase to about a 300% increase, about a 25% increase to about a 250% increase, about a 25% increase to about a 200% increase, about a 25% increase to about a 180% increase, about a 25% increase to about a 160% increase, about a 25% increase to about a 140% increase, about a 25% increase to about a 120% increase, about a 25% increase to about a 100% increase, about a 25% increase to about a 95% increase, about a 25% increase to about a 90% increase, about a 25% increase to about a 85% increase, about a 25% increase to about a 80% increase, about a 25% increase to about a 75% increase, about a 25% increase to about a 70% increase, about a 25% increase to about a 65% increase, about a 25% increase to about a 60% increase, about a 25% increase to about a 55% increase, about a 25% increase to about a 50% increase, about a 25% increase to about a 45% increase, about a 25% increase to about a 40% increase, about a 25% increase to about a 35% increase, about a 25% increase to about a 30% increase, about a 30% increase to about 10,000% increase, about a 30% increase to about a 9,000% increase, about a 30% increase to about a 8,000% increase, about a 30% increase to about a 7,000% increase, about a 30% increase to about a 6,000% increase, about a 30% increase to about a 5,000% increase, about a 30% increase to about a 4,000% increase, about a 30% increase to about a 3,000% increase, about a 30% increase to about a 2,000% increase, about a 30% increase to about a 1,000% increase, about a 30% increase to about a 500% increase, about a 30% increase to about a 450% increase, about a 30% increase to about a 400% increase, about a 30% increase to about a 350% increase, about a 30% increase to about a 300% increase, about a 30% increase to about a 250% increase, about a 30% increase to about a 200% increase, about a 30% increase to about a 180% increase, about a 30% increase to about a 160% increase, about a 30% increase to about a 140% increase, about a 30% increase to about a 120% increase, about a 30% increase to about a 100% increase, about a 30% increase to about a 95% increase, about a 30% increase to about a 90% increase, about a 30% increase to about a 85% increase, about a 30% increase to about a 80% increase, about a 30% increase to about a 75% increase, about a 30% increase to about a 70% increase, about a 30% increase to about a 65% increase, about a 30% increase to about a 60% increase, about a 30% increase to about a 55% increase, about a 30% increase to about a 50% increase, about a 30% increase to about a 45% increase, about a 30% increase to about a 40% increase, about a 30% increase to about a 35% increase, about a 35% increase to about 10,000% increase, about a 35% increase to about a 9,000% increase, about a 35% increase to about a 8,000% increase, about a 35% increase to about a 7,000% increase, about a 35% increase to about a 6,000% increase, about a 35% increase to about a 5,000% increase, about a 35% increase to about a 4,000% increase, about a 35% increase to about a 3,000% increase, about a 35% increase to about a 2,000% increase, about a 35% increase to about a 1,000% increase, about a 35% increase to about a 500% increase, about a 35% increase to about a 450% increase, about a 35% increase to about a 400% increase, about a 35% increase to about a 350% increase, about a 35% increase to about a 300% increase, about a 35% increase to about a 250% increase, about a 35% increase to about a 200% increase, about a 35% increase to about a 180% increase, about a 35% increase to about a 160% increase, about a 35% increase to about a 140% increase, about a 35% increase to about a 120% increase, about a 35% increase to about a 100% increase, about a 35% increase to about a 95% increase, about a 35% increase to about a 90% increase, about a 35% increase to about a 85% increase, about a 35% increase to about a 80% increase, about a 35% increase to about a 75% increase, about a 35% increase to about a 70% increase, about a 35% increase to about a 65% increase, about a 35% increase to about a 60% increase, about a 35% increase to about a 55% increase, about a 35% increase to about a 50% increase, about a 35% increase to about a 45% increase, about a 35% increase to about a 40% increase, about a 40% increase to about 10,000% increase, about a 40% increase to about a 9,000% increase, about a 40% increase to about a 8,000% increase, about a 40% increase to about a 7,000% increase, about a 40% increase to about a 6,000% increase, about a 40% increase to about a 5,000% increase, about a 40% increase to about a 4,000% increase, about a 40% increase to about a 3,000% increase, about a 40% increase to about a 2,000% increase, about a 40% increase to about a 1,000% increase, about a 40% increase to about a 500% increase, about a 40% increase to about a 450% increase, about a 40% increase to about a 400% increase, about a 40% increase to about a 350% increase, about a 40% increase to about a 300% increase, about a 40% increase to about a 250% increase, about a 40% increase to about a 200% increase, about a 40% increase to about a 180% increase, about a 40% increase to about a 160% increase, about a 40% increase to about a 140% increase, about a 40% increase to about a 120% increase, about a 40% increase to about a 100% increase, about a 40% increase to about a 95% increase, about a 40% increase to about a 90% increase, about a 40% increase to about a 85% increase, about a 40% increase to about a 80% increase, about a 40% increase to about a 75% increase, about a 40% increase to about a 70% increase, about a 40% increase to about a 65% increase, about a 40% increase to about a 60% increase, about a 40% increase to about a 55% increase, about a 40% increase to about a 50% increase, about a 40% increase to about a 45% increase, about a 45% increase to about 10,000% increase, about a 45% increase to about a 9,000% increase, about a 45% increase to about a 8,000% increase, about a 45% increase to about a 7,000% increase, about a 45% increase to about a 6,000% increase, about a 45% increase to about a 5,000% increase, about a 45% increase to about a 4,000% increase, about a 45% increase to about a 3,000% increase, about a 45% increase to about a 2,000% increase, about a 45% increase to about a 1,000% increase, about a 45% increase to about a 500% increase, about a 45% increase to about a 450% increase, about a 45% increase to about a 400% increase, about a 45% increase to about a 350% increase, about a 45% increase to about a 300% increase, about a 45% increase to about a 250% increase, about a 45% increase to about a 200% increase, about a 45% increase to about a 180% increase, about a 45% increase to about a 160% increase, about a 45% increase to about a 140% increase, about a 45% increase to about a 120% increase, about a 45% increase to about a 100% increase, about a 45% increase to about a 95% increase, about a 45% increase to about a 90% increase, about a 45% increase to about a 85% increase, about a 45% increase to about a 80% increase, about a 45% increase to about a 75% increase, about a 45% increase to about a 70% increase, about a 45% increase to about a 65% increase, about a 45% increase to about a 60% increase, about a 45% increase to about a 55% increase, about a 45% increase to about a 50% increase, about a 50% increase to about 10,000% increase, about a 50% increase to about a 9,000% increase, about a 50% increase to about a 8,000% increase, about a 50% increase to about a 7,000% increase, about a 50% increase to about a 6,000% increase, about a 50% increase to about a 5,000% increase, about a 50% increase to about a 4,000% increase, about a 50% increase to about a 3,000% increase, about a 50% increase to about a 2,000% increase, about a 50% increase to about a 1,000% increase, about a 50% increase to about a 500% increase, about a 50% increase to about a 450% increase, about a 50% increase to about a 400% increase, about a 50% increase to about a 350% increase, about a 50% increase to about a 300% increase, about a 50% increase to about a 250% increase, about a 50% increase to about a 200% increase, about a 50% increase to about a 180% increase, about a 50% increase to about a 160% increase, about a 50% increase to about a 140% increase, about a 50% increase to about a 120% increase, about a 50% increase to about a 100% increase, about a 50% increase to about a 95% increase, about a 50% increase to about a 90% increase, about a 50% increase to about a 85% increase, about a 50% increase to about a 80% increase, about a 50% increase to about a 75% increase, about a 50% increase to about a 70% increase, about a 50% increase to about a 65% increase, about a 50% increase to about a 60% increase, about a 50% increase to about a 55% increase, about a 55% increase to about 10,000% increase, about a 55% increase to about a 9,000% increase, about a 55% increase to about a 8,000% increase, about a 55% increase to about a 7,000% increase, about a 55% increase to about a 6,000% increase, about a 55% increase to about a 5,000% increase, about a 55% increase to about a 4,000% increase, about a 55% increase to about a 3,000% increase, about a 55% increase to about a 2,000% increase, about a 55% increase to about a 1,000% increase, about a 55% increase to about a 500% increase, about a 55% increase to about a 450% increase, about a 55% increase to about a 400% increase, about a 55% increase to about a 350% increase, about a 55% increase to about a 300% increase, about a 55% increase to about a 250% increase, about a 55% increase to about a 200% increase, about a 55% increase to about a 180% increase, about a 55% increase to about a 160% increase, about a 55% increase to about a 140% increase, about a 55% increase to about a 120% increase, about a 55% increase to about a 100% increase, about a 55% increase to about a 95% increase, about a 55% increase to about a 90% increase, about a 55% increase to about a 85% increase, about a 55% increase to about a 80% increase, about a 55% increase to about a 75% increase, about a 55% increase to about a 70% increase, about a 55% increase to about a 65% increase, about a 55% increase to about a 60% increase, about a 60% increase to about 10,000% increase, about a 60% increase to about a 9,000% increase, about a 60% increase to about a 8,000% increase, about a 60% increase to about a 7,000% increase, about a 60% increase to about a 6,000% increase, about a 60% increase to about a 5,000% increase, about a 60% increase to about a 4,000% increase, about a 60% increase to about a 3,000% increase, about a 60% increase to about a 2,000% increase, about a 60% increase to about a 1,000% increase, about a 60% increase to about a 500% increase, about a 60% increase to about a 450% increase, about a 60% increase to about a 400% increase, about a 60% increase to about a 350% increase, about a 60% increase to about a 300% increase, about a 60% increase to about a 250% increase, about a 60% increase to about a 200% increase, about a 60% increase to about a 180% increase, about a 60% increase to about a 160% increase, about a 60% increase to about a 140% increase, about a 60% increase to about a 120% increase, about a 60% increase to about a 100% increase, about a 60% increase to about a 95% increase, about a 60% increase to about a 90% increase, about a 60% increase to about a 85% increase, about a 60% increase to about a 80% increase, about a 60% increase to about a 75% increase, about a 60% increase to about a 70% increase, about a 60% increase to about a 65% increase, about a 65% increase to about 10,000% increase, about a 65% increase to about a 9,000% increase, about a 65% increase to about a 8,000% increase, about a 65% increase to about a 7,000% increase, about a 65% increase to about a 6,000% increase, about a 65% increase to about a 5,000% increase, about a 65% increase to about a 4,000% increase, about a 65% increase to about a 3,000% increase, about a 65% increase to about a 2,000% increase, about a 65% increase to about a 1,000% increase, about a 65% increase to about a 500% increase, about a 65% increase to about a 450% increase, about a 65% increase to about a 400% increase, about a 65% increase to about a 350% increase, about a 65% increase to about a 300% increase, about a 65% increase to about a 250% increase, about a 65% increase to about a 200% increase, about a 65% increase to about a 180% increase, about a 65% increase to about a 160% increase, about a 65% increase to about a 140% increase, about a 65% increase to about a 120% increase, about a 65% increase to about a 100% increase, about a 65% increase to about a 95% increase, about a 65% increase to about a 90% increase, about a 65% increase to about a 85% increase, about a 65% increase to about a 80% increase, about a 65% increase to about a 75% increase, about a 65% increase to about a 70% increase, about a 70% increase to about 10,000% increase, about a 70% increase to about a 9,000% increase, about a 70% increase to about a 8,000% increase, about a 70% increase to about a 7,000% increase, about a 70% increase to about a 6,000% increase, about a 70% increase to about a 5,000% increase, about a 70% increase to about a 4,000% increase, about a 70% increase to about a 3,000% increase, about a 70% increase to about a 2,000% increase, about a 70% increase to about a 1,000% increase, about a 70% increase to about a 500% increase, about a 70% increase to about a 450% increase, about a 70% increase to about a 400% increase, about a 70% increase to about a 350% increase, about a 70% increase to about a 300% increase, about a 70% increase to about a 250% increase, about a 70% increase to about a 200% increase, about a 70% increase to about a 180% increase, about a 70% increase to about a 160% increase, about a 70% increase to about a 140% increase, about a 70% increase to about a 120% increase, about a 70% increase to about a 100% increase, about a 70% increase to about a 95% increase, about a 70% increase to about a 90% increase, about a 70% increase to about a 85% increase, about a 70% increase to about a 80% increase, about a 70% increase to about a 75% increase, about a 75% increase to about 10,000% increase, about a 75% increase to about a 9,000% increase, about a 75% increase to about a 8,000% increase, about a 75% increase to about a 7,000% increase, about a 75% increase to about a 6,000% increase, about a 75% increase to about a 5,000% increase, about a 75% increase to about a 4,000% increase, about a 75% increase to about a 3,000% increase, about a 75% increase to about a 2,000% increase, about a 75% increase to about a 1,000% increase, about a 75% increase to about a 500% increase, about a 75% increase to about a 450% increase, about a 75% increase to about a 400% increase, about a 75% increase to about a 350% increase, about a 75% increase to about a 300% increase, about a 75% increase to about a 250% increase, about a 75% increase to about a 200% increase, about a 75% increase to about a 180% increase, about a 75% increase to about a 160% increase, about a 75% increase to about a 140% increase, about a 75% increase to about a 120% increase, about a 75% increase to about a 100% increase, about a 75% increase to about a 95% increase, about a 75% increase to about a 90% increase, about a 75% increase to about a 85% increase, about a 75% increase to about a 80%, about a 80% increase to about 10,000% increase, about a 80% increase to about a 9,000% increase, about a 80% increase to about a 8,000% increase, about a 80% increase to about a 7,000% increase, about a 80% increase to about a 6,000% increase, about a 80% increase to about a 5,000% increase, about a 80% increase to about a 4,000% increase, about a 80% increase to about a 3,000% increase, about a 80% increase to about a 2,000% increase, about a 80% increase to about a 1,000% increase, increase, about a 80% increase to about a 500% increase, about a 80% increase to about a 450% increase, about a 80% increase to about a 400% increase, about a 80% increase to about a 350% increase, about a 80% increase to about a 300% increase, about a 80% increase to about a 250% increase, about a 80% increase to about a 200% increase, about a 80% increase to about a 180% increase, about a 80% increase to about a 160% increase, about a 80% increase to about a 140% increase, about a 80% increase to about a 120% increase, about a 80% increase to about a 100% increase, about a 80% increase to about a 95% increase, about a 80% increase to about a 90% increase, about a 80% increase to about a 85% increase, about a 85% increase to about 10,000% increase, about a 85% increase to about a 9,000% increase, about a 85% increase to about a 8,000% increase, about a 85% increase to about a 7,000% increase, about a 85% increase to about a 6,000% increase, about a 85% increase to about a 5,000% increase, about a 85% increase to about a 4,000% increase, about a 85% increase to about a 3,000% increase, about a 85% increase to about a 2,000% increase, about a 85% increase to about a 1,000% increase, about a 85% increase to about a 500% increase, about a 85% increase to about a 450% increase, about a 85% increase to about a 400% increase, about a 85% increase to about a 350% increase, about a 85% increase to about a 300% increase, about a 85% increase to about a 250% increase, about a 85% increase to about a 200% increase, about a 85% increase to about a 180% increase, about a 85% increase to about a 160% increase, about a 85% increase to about a 140% increase, about a 85% increase to about a 120% increase, about a 85% increase to about a 100% increase, about a 85% increase to about a 95% increase, about a 85% increase to about a 90% increase, about a 90% increase to about 10,000% increase, about a 90% increase to about a 9,000% increase, about a 90% increase to about a 8,000% increase, about a 90% increase to about a 7,000% increase, about a 90% increase to about a 6,000% increase, about a 90% increase to about a 5,000% increase, about a 90% increase to about a 4,000% increase, about a 90% increase to about a 3,000% increase, about a 90% increase to about a 2,000% increase, about a 90% increase to about a 1,000% increase, about a 90% increase to about a 500% increase, about a 90% increase to about a 450% increase, about a 90% increase to about a 400% increase, about a 90% increase to about a 350% increase, about a 90% increase to about a 300% increase, about a 90% increase to about a 250% increase, about a 90% increase to about a 200% increase, about a 90% increase to about a 180% increase, about a 90% increase to about a 160% increase, about a 90% increase to about a 140% increase, about a 90% increase to about a 120% increase, about a 90% increase to about a 100% increase, about a 90% increase to about a 95% increase, about a 95% increase to about 10,000% increase, about a 95% increase to about a 9,000% increase, about a 95% increase to about a 8,000% increase, about a 95% increase to about a 7,000% increase, about a 95% increase to about a 6,000% increase, about a 95% increase to about a 5,000% increase, about a 95% increase to about a 4,000% increase, about a 95% increase to about a 3,000% increase, about a 95% increase to about a 2,000% increase, about a 95% increase to about a 1,000% increase, about a 95% increase to about a 500% increase, about a 95% increase to about a 450% increase, about a 95% increase to about a 400% increase, about a 95% increase to about a 350% increase, about a 95% increase to about a 300% increase, about a 95% increase to about a 250% increase, about a 95% increase to about a 200% increase, about a 95% increase to about a 180% increase, about a 95% increase to about a 160% increase, about a 95% increase to about a 140% increase, about a 95% increase to about a 120% increase, about a 95% increase to about a 100% increase, about a 100% increase to about 10,000% increase, about a 100% increase to about a 9,000% increase, about a 100% increase to about a 8,000% increase, about a 100% increase to about a 7,000% increase, about a 100% increase to about a 6,000% increase, about a 100% increase to about a 5,000% increase, about a 100% increase to about a 4,000% increase, about a 100% increase to about a 3,000% increase, about a 100% increase to about a 2,000% increase, about a 100% increase to about a 1,000% increase, about a 100% increase to about a 500% increase, about a 100% increase to about a 450% increase, about a 100% increase to about a 400% increase, about a 100% increase to about a 350% increase, about a 100% increase to about a 300% increase, about a 100% increase to about a 250% increase, about a 100% increase to about a 200% increase, about a 100% increase to about a 180% increase, about a 100% increase to about a 160% increase, about a 100% increase to about a 140% increase, about a 100% increase to about a 120% increase, about a 120% increase to about 10,000% increase, about a 120% increase to about a 9,000% increase, about a 120% increase to about a 8,000% increase, about a 120% increase to about a 7,000% increase, about a 120% increase to about a 6,000% increase, about a 120% increase to about a 5,000% increase, about a 120% increase to about a 4,000% increase, about a 120% increase to about a 3,000% increase, about a 120% increase to about a 2,000% increase, about a 120% increase to about a 1,000% increase, about a 120% increase to about a 500% increase, about a 120% increase to about a 450% increase, about a 120% increase to about a 400% increase, about a 120% increase to about a 350% increase, about a 120% increase to about a 300% increase, about a 120% increase to about a 250% increase, about a 120% increase to about a 200% increase, about a 120% increase to about a 180% increase, about a 120% increase to about a 160% increase, about a 120% increase to about a 140% increase, about a 140% increase to about 10,000% increase, about a 140% increase to about a 9,000% increase, about a 140% increase to about a 8,000% increase, about a 140% increase to about a 7,000% increase, about a 140% increase to about a 6,000% increase, about a 140% increase to about a 5,000% increase, about a 140% increase to about a 4,000% increase, about a 140% increase to about a 3,000% increase, about a 140% increase to about a 2,000% increase, about a 140% increase to about a 1,000% increase, about a 140% increase to about a 500% increase, about a 140% increase to about a 450% increase, about a 140% increase to about a 400% increase, about a 140% increase to about a 350% increase, about a 140% increase to about a 300% increase, about a 140% increase to about a 250% increase, about a 140% increase to about a 200% increase, about a 140% increase to about a 180% increase, about a 140% increase to about a 160% increase, about a 160% increase to about 10,000% increase, about a 160% increase to about a 9,000% increase, about a 160% increase to about a 8,000% increase, about a 160% increase to about a 7,000% increase, about a 160% increase to about a 6,000% increase, about a 160% increase to about a 5,000% increase, about a 160% increase to about a 4,000% increase, about a 160% increase to about a 3,000% increase, about a 160% increase to about a 2,000% increase, about a 160% increase to about a 1,000% increase, about a 160% increase to about a 500% increase, about a 160% increase to about a 450% increase, about a 160% increase to about a 400% increase, about a 160% increase to about a 350% increase, about a 160% increase to about a 300% increase, about a 160% increase to about a 250% increase, about a 160% increase to about a 200% increase, about a 160% increase to about a 180% increase, about a 180% increase to about 10,000% increase, about a 180% increase to about a 9,000% increase, about a 180% increase to about a 8,000% increase, about a 180% increase to about a 7,000% increase, about a 180% increase to about a 6,000% increase, about a 180% increase to about a 5,000% increase, about a 180% increase to about a 4,000% increase, about a 180% increase to about a 3,000% increase, about a 180% increase to about a 2,000% increase, about a 180% increase to about a 1,000% increase, about a 180% increase to about a 500% increase, about a 180% increase to about a 450% increase, about a 180% increase to about a 400% increase, about a 180% increase to about a 350% increase, about a 180% increase to about a 300% increase, about a 180% increase to about a 250% increase, about a 180% increase to about a 200% increase, about a 200% increase to about 10,000% increase, about a 200% increase to about a 9,000% increase, about a 200% increase to about a 8,000% increase, about a 200% increase to about a 7,000% increase, about a 200% increase to about a 6,000% increase, about a 200% increase to about a 5,000% increase, about a 200% increase to about a 4,000% increase, about a 200% increase to about a 3,000% increase, about a 200% increase to about a 2,000% increase, about a 200% increase to about a 1,000% increase, about a 200% increase to about a 500% increase, about a 200% increase to about a 450% increase, about a 200% increase to about a 400% increase, about a 200% increase to about a 350% increase, about a 200% increase to about a 300% increase, about a 200% increase to about a 250% increase, about a 250% increase to about 10,000% increase, about a 250% increase to about a 9,000% increase, about a 250% increase to about a 8,000% increase, about a 250% increase to about a 7,000% increase, about a 250% increase to about a 6,000% increase, about a 250% increase to about a 5,000% increase, about a 250% increase to about a 4,000% increase, about a 250% increase to about a 3,000% increase, about a 250% increase to about a 2,000% increase, about a 250% increase to about a 1,000% increase, about a 250% increase to about a 500% increase, about a 250% increase to about a 450% increase, about a 250% increase to about a 400% increase, about a 250% increase to about a 350% increase, about a 250% increase to about a 300% increase, about a 300% increase to about 10,000% increase, about a 300% increase to about a 9,000% increase, about a 300% increase to about a 8,000% increase, about a 300% increase to about a 7,000% increase, about a 300% increase to about a 6,000% increase, about a 300% increase to about a 5,000% increase, about a 300% increase to about a 4,000% increase, about a 300% increase to about a 3,000% increase, about a 300% increase to about a 2,000% increase, about a 300% increase to about a 1,000% increase, about a 300% increase to about a 500% increase, about a 300% increase to about a 450% increase, about a 300% increase to about a 400% increase, about a 300% increase to about a 350% increase, about a 350% increase to about 10,000% increase, about a 350% increase to about a 9,000% increase, about a 350% increase to about a 8,000% increase, about a 350% increase to about a 7,000% increase, about a 350% increase to about a 6,000% increase, about a 350% increase to about a 5,000% increase, about a 350% increase to about a 4,000% increase, about a 350% increase to about a 3,000% increase, about a 350% increase to about a 2,000% increase, about a 350% increase to about a 1,000% increase, about a 350% increase to about a 500% increase, about a 350% increase to about a 450% increase, about a 350% increase to about a 400% increase, about a 400% increase to about 10,000% increase, about a 400% increase to about a 9,000% increase, about a 400% increase to about a 8,000% increase, about a 400% increase to about a 7,000% increase, about a 400% increase to about a 6,000% increase, about a 400% increase to about a 5,000% increase, about a 400% increase to about a 4,000% increase, about a 400% increase to about a 3,000% increase, about a 400% increase to about a 2,000% increase, about a 400% increase to about a 1,000% increase, about a 400% increase to about a 500% increase, about a 400% increase to about a 450% increase, about a 450% increase to about 10,000% increase, about a 450% increase to about a 9,000% increase, about a 450% increase to about a 8,000% increase, about a 450% increase to about a 7,000% increase, about a 450% increase to about a 6,000% increase, about a 450% increase to about a 5,000% increase, about a 450% increase to about a 4,000% increase, about a 450% increase to about a 3,000% increase, about a 450% increase to about a 2,000% increase, about a 450% increase to about a 1,000% increase, about a 450% increase to about a 500% increase, about a 500% increase to about 10,000% increase, about a 500% increase to about a 9,000% increase, about a 500% increase to about a 8,000% increase, about a 500% increase to about a 7,000% increase, about a 500% increase to about a 6,000% increase, about a 500% increase to about a 5,000% increase, about a 500% increase to about a 4,000% increase, about a 500% increase to about a 3,000% increase, about a 500% increase to about a 2,000% increase, about a 500% increase to about a 1,000% increase, about a 1,000% increase to about 10,000% increase, about a 1,000% increase to about a 9,000% increase, about a 1,000% increase to about a 8,000% increase, about a 1,000% increase to about a 7,000% increase, about a 1,000% increase to about a 6,000% increase, about a 1,000% increase to about a 5,000% increase, about a 1,000% increase to about a 4,000% increase, about a 1,000% increase to about a 3,000% increase, about a 1,000% increase to about a 2,000% increase, about a 2,000% increase to about 10,000% increase, about a 2,000% increase to about a 9,000% increase, about a 2,000% increase to about a 8,000% increase, about a 2,000% increase to about a 7,000% increase, about a 2,000% increase to about a 6,000% increase, about a 2,000% increase to about a 5,000% increase, about a 2,000% increase to about a 4,000% increase, about a 2,000% increase to about a 3,000% increase, about a 3,000% increase to about 10,000% increase, about a 3,000% increase to about a 9,000% increase, about a 3,000% increase to about a 8,000% increase, about a 3,000% increase to about a 7,000% increase, about a 3,000% increase to about a 6,000% increase, about a 3,000% increase to about a 5,000% increase, about a 3,000% increase to about a 4,000% increase, about a 4,000% increase to about 10,000% increase, about a 4,000% increase to about a 9,000% increase, about a 4,000% increase to about a 8,000% increase, about a 4,000% increase to about a 7,000% increase, about a 4,000% increase to about a 6,000% increase, about a 4,000% increase to about a 5,000% increase, about a 5,000% increase to about 10,000% increase, about a 5,000% increase to about a 9,000% increase, about a 5,000% increase to about a 8,000% increase, about a 5,000% increase to about a 7,000% increase, about a 5,000% increase to about a 6,000% increase, about a 6,000% increase to about 10,000% increase, about a 6,000% increase to about a 9,000% increase, about a 6,000% increase to about a 8,000% increase, about a 6,000% increase to about a 7,000% increase, about a 7,000% increase to about 10,000% increase, about a 7,000% increase to about a 9,000% increase, about a 7,000% increase to about a 8,000% increase, about a 8,000% increase to about 10,000% increase, about a 8,000% increase to about a 9,000% increase, or about a 9,000% increase to about 10,000%) in toxin liberation in the target mammalian cell (e.g., any of the target mammalian cells described herein) as compared to a composition including the same amount of a control ABPC (e.g., any of the exemplary control ABPCs described herein).

[0563] In some examples of any of the ABPCs described herein, a composition including the ABPC (e.g., any of the ABPCs described herein) can provide for an increase (e.g., a detectable increase) (e.g., at least a 0.1-fold increase, at least a 0.2-fold increase, at least a 0.3-fold increase, at least a 0.4-fold increase, at least a 0.5-fold increase, at least a 0.6-fold increase, at least a 0.7-fold increase, at least a 0.8-fold increase, at least a 0.9-fold increase, at least a 1.0-fold increase, at least a 1.2-fold increase, at least a 1.4-fold increase, at least a 1.5-fold increase, at least a 1.6-fold increase, at least a 1.8-fold increase, at least a 2.0-fold increase, at least a 2.2-fold increase, at least a 2.4-fold increase, at least a 2.5-fold increase, at least a 2.6-fold increase, at least a 2.8-fold increase, at least a 3.0-fold increase, at least a 3.5-fold increase, at least a 4.0-fold increase, at least a 4.5-fold increase, at least a 5.0-fold increase, at least a 5.5-fold increase, at least a 6.0-fold increase, at least a 6.5-fold increase, at least a 7.0-fold increase, at least a 7.5-fold increase, at least a 8.0-fold increase, at least a 8.5-fold increase, at least a 9.0-fold increase, at least a 9.5-fold increase, at least a 10-fold increase, at least a 15-fold increase, at least a 20-fold increase, at least a 25-fold increase, at least a 30-fold increase, at least a 35-fold increase, at least a 40-fold increase, at least a 45-fold increase, at least a 50-fold increase, at least a 55-fold increase, at least a 60-fold increase, at least a 65-fold increase, at least a 70-fold increase, at least a 75-fold increase, at least a 80-fold increase, at least a 85-fold increase, at least a 90-fold increase, at least a 95-fold increase, or at least a 100-fold increase, or about a 0.1-fold increase to about a 100-fold increase, about 0.1-fold increase to about a 90-fold increase, about 0.1-fold increase to about a 80-fold increase, about a 0.1-fold increase to about a 70-fold increase, about a 0.1-fold increase to about a 60-fold increase, about a 0.1-fold increase to about a 50-fold increase, about a 0.1-fold increase to about a 40-fold increase, about a 0.1-fold increase to about a 30-fold increase, about 0.1-fold increase to about 20-fold increase, about a 0.1-fold increase to about a 10-fold increase, about a 0.1-fold increase to about a 9.5-fold increase, about a 0.1-fold increase to about a 9.0-fold increase, about a 0.1-fold increase to about a 8.5-fold increase, about a 0.1-fold increase to about a 8.0-fold increase, about a 0.1-fold increase to about a 7.5-fold increase, about a 0.1-fold increase to about a 7.0-fold increase, about a 0.1-fold increase to about a 6.5-fold increase, about a 0.1-fold increase to about a 6.0-fold increase, about a 0.1-fold increase to about a 5.5-fold increase, about a 0.1-fold increase to about a 5.0-fold increase, about a 0.1-fold increase to about a 4.5-fold increase, about a 0.1-fold increase to about a 4.0-fold increase, about a 0.1-fold increase to about a 3.5-fold increase, about 0.1-fold increase to about a 3.0-fold increase, about a 0.1-fold increase to about a 2.8-fold increase, about a 0.1-fold increase to about a 2.6-fold increase, about a 0.1-fold increase to about a 2.5-fold increase, about a 0.1-fold increase to about a 2.4-fold increase, about a 0.1-fold increase to about a 2.2-fold increase, about a 0.1-fold increase to about a 2.0-fold increase, about a 0.1-fold increase to about a 1.8-fold increase, about a 0.1-fold increase to about a 1.6-fold increase, about a 0.1-fold increase to about a 1.5-fold increase, about a 0.1-fold increase to about a 1.4-fold increase, about a 0.1-fold increase to about a 1.2-fold increase, about a 0.1-fold increase to about a 1.0-fold increase, about a 0.1-fold increase to about a 0.9-fold increase, about a 0.1-fold increase to about a 0.8-fold increase, about a 0.1-fold increase to about a 0.7-fold increase, about a 0.1-fold increase to about a 0.6-fold increase, about a 0.1-fold increase to about a 0.5-fold increase, about a 0.1-fold increase to about a 0.4-fold increase, about a 0.1-fold increase to about a 0.3-fold increase, about a 0.2-fold increase to about a 100-fold increase, about 0.2-fold increase to about a 90-fold increase, about 0.2-fold increase to about a 80-fold increase, about a 0.2-fold increase to about a 70-fold increase, about a 0.2-fold increase to about a 60-fold increase, about a 0.2-fold increase to about a 50-fold increase, about a 0.2-fold increase to about a 40-fold increase, about a 0.2-fold increase to about a 30-fold increase, about 0.2-fold increase to about 20-fold increase, about a 0.2-fold increase to about a 10-fold increase, about a 0.2-fold increase to about a 9.5-fold increase, about a 0.2-fold increase to about a 9.0-fold increase, about a 0.2-fold increase to about a 8.5-fold increase, about a 0.2-fold increase to about a 8.0-fold increase, about a 0.2-fold increase to about a 7.5-fold increase, about a 0.2-fold increase to about a 7.0-fold increase, about a 0.2-fold increase to about a 6.5-fold increase, about a 0.2-fold increase to about a 6.0-fold increase, about a 0.2-fold increase to about a 5.5-fold increase, about a 0.2-fold increase to about a 5.0-fold increase, about a 0.2-fold increase to about a 4.5-fold increase, about a 0.2-fold increase to about a 4.0-fold increase, about a 0.2-fold increase to about a 3.5-fold increase, about 0.2-fold increase to about a 3.0-fold increase, about a 0.2-fold increase to about a 2.8-fold increase, about a 0.2-fold increase to about a 2.6-fold increase, about a 0.2-fold increase to about a 2.5-fold increase, about a 0.2-fold increase to about a 2.4-fold increase, about a 0.2-fold increase to about a 2.2-fold increase, about a 0.2-fold increase to about a 2.0-fold increase, about a 0.2-fold increase to about a 1.8-fold increase, about a 0.2-fold increase to about a 1.6-fold increase, about a 0.2-fold increase to about a 1.5-fold increase, about a 0.2-fold increase to about a 1.4-fold increase, about a 0.2-fold increase to about a 1.2-fold increase, about a 0.2-fold increase to about a 1.0-fold increase, about a 0.2-fold increase to about a 0.9-fold increase, about a 0.2-fold increase to about a 0.8-fold increase, about a 0.2-fold increase to about a 0.7-fold increase, about a 0.2-fold increase to about a 0.6-fold increase, about a 0.2-fold increase to about a 0.5-fold increase, about a 0.2-fold increase to about a 0.4-fold increase, about a 0.3-fold increase to about a 100-fold increase, about 0.3-fold increase to about a 90-fold increase, about 0.3-fold increase to about a 80-fold increase, about a 0.3-fold increase to about a 70-fold increase, about a 0.3-fold increase to about a 60-fold increase, about a 0.3-fold increase to about a 50-fold increase, about a 0.3-fold increase to about a 40-fold increase, about a 0.3-fold increase to about a 30-fold increase, about 0.3-fold increase to about 20-fold increase, about a 0.3-fold increase to about a 10-fold increase, about a 0.3-fold increase to about a 9.5-fold increase, about a 0.3-fold increase to about a 9.0-fold increase, about a 0.3-fold increase to about a 8.5-fold increase, about a 0.3-fold increase to about a 8.0-fold increase, about a 0.3-fold increase to about a 7.5-fold increase, about a 0.3-fold increase to about a 7.0-fold increase, about a 0.3-fold increase to about a 6.5-fold increase, about a 0.3-fold increase to about a 6.0-fold increase, about a 0.3-fold increase to about a 5.5-fold increase, about a 0.3-fold increase to about a 5.0-fold increase, about a 0.3-fold increase to about a 4.5-fold increase, about a 0.3-fold increase to about a 4.0-fold increase, about a 0.3-fold increase to about a 3.5-fold increase, about 0.3-fold increase to about a 3.0-fold increase, about a 0.3-fold increase to about a 2.8-fold increase, about a 0.3-fold increase to about a 2.6-fold increase, about a 0.3-fold increase to about a 2.5-fold increase, about a 0.3-fold increase to about a 2.4-fold increase, about a 0.3-fold increase to about a 2.2-fold increase, about a 0.3-fold increase to about a 2.0-fold increase, about a 0.3-fold increase to about a 1.8-fold increase, about a 0.3-fold increase to about a 1.6-fold increase, about a 0.3-fold increase to about a 1.5-fold increase, about a 0.3-fold increase to about a 1.4-fold increase, about a 0.3-fold increase to about a 1.2-fold increase, about a 0.3-fold increase to about a 1.0-fold increase, about a 0.3-fold increase to about a 0.9-fold increase, about a 0.3-fold increase to about a 0.8-fold increase, about a 0.3-fold increase to about a 0.7-fold increase, about a 0.3-fold increase to about a 0.6-fold increase, about a 0.3-fold increase to about a 0.5-fold increase, about a 0.4-fold increase to about a 100-fold increase, about 0.4-fold increase to about a 90-fold increase, about 0.4-fold increase to about a 80-fold increase, about a 0.4-fold increase to about a 70-fold increase, about a 0.4-fold increase to about a 60-fold increase, about a 0.4-fold increase to about a 50-fold increase, about a 0.4-fold increase to about a 40-fold increase, about a 0.4-fold increase to about a 30-fold increase, about 0.4-fold increase to about 20-fold increase, about a 0.4-fold increase to about a 10-fold increase, about a 0.4-fold increase to about a 9.5-fold increase, about a 0.4-fold increase to about a 9.0-fold increase, about a 0.4-fold increase to about a 8.5-fold increase, about a 0.4-fold increase to about a 8.0-fold increase, about a 0.4-fold increase to about a 7.5-fold increase, about a 0.4-fold increase to about a 7.0-fold increase, about a 0.4-fold increase to about a 6.5-fold increase, about a 0.4-fold increase to about a 6.0-fold increase, about a 0.4-fold increase to about a 5.5-fold increase, about a 0.4-fold increase to about a 5.0-fold increase, about a 0.4-fold increase to about a 4.5-fold increase, about a 0.4-fold increase to about a 4.0-fold increase, about a 0.4-fold increase to about a 3.5-fold increase, about 0.4-fold increase to about a 3.0-fold increase, about a 0.4-fold increase to about a 2.8-fold increase, about a 0.4-fold increase to about a 2.6-fold increase, about a 0.4-fold increase to about a 2.5-fold increase, about a 0.4-fold increase to about a 2.4-fold increase, about a 0.4-fold increase to about a 2.2-fold increase, about a 0.4-fold increase to about a 2.0-fold increase, about a 0.4-fold increase to about a 1.8-fold increase, about a 0.4-fold increase to about a 1.6-fold increase, about a 0.4-fold increase to about a 1.5-fold increase, about a 0.4-fold increase to about a 1.4-fold increase, about a 0.4-fold increase to about a 1.2-fold increase, about a 0.4-fold increase to about a 1.0-fold increase, about a 0.4-fold increase to about a 0.9-fold increase, about a 0.4-fold increase to about a 0.8-fold increase, about a 0.4-fold increase to about a 0.7-fold increase, about a 0.4-fold increase to about a 0.6-fold increase, about a 0.5-fold increase to about a 100-fold increase, about 0.5-fold increase to about a 90-fold increase, about 0.5-fold increase to about a 80-fold increase, about a 0.5-fold increase to about a 70-fold increase, about a 0.5-fold increase to about a 60-fold increase, about a 0.5-fold increase to about a 50-fold increase, about a 0.5-fold increase to about a 40-fold increase, about a 0.5-fold increase to about a 30-fold increase, about 0.5-fold increase to about 20-fold increase, about a 0.5-fold increase to about a 10-fold increase, about a 0.5-fold increase to about a 9.5-fold increase, about a 0.5-fold increase to about a 9.0-fold increase, about a 0.5-fold increase to about a 8.5-fold increase, about a 0.5-fold increase to about a 8.0-fold increase, about a 0.5-fold increase to about a 7.5-fold increase, about a 0.5-fold increase to about a 7.0-fold increase, about a 0.5-fold increase to about a 6.5-fold increase, about a 0.5-fold increase to about a 6.0-fold increase, about a 0.5-fold increase to about a 5.5-fold increase, about a 0.5-fold increase to about a 5.0-fold increase, about a 0.5-fold increase to about a 4.5-fold increase, about a 0.5-fold increase to about a 4.0-fold increase, about a 0.5-fold increase to about a 3.5-fold increase, about 0.5-fold increase to about a 3.0-fold increase, about a 0.5-fold increase to about a 2.8-fold increase, about a 0.5-fold increase to about a 2.6-fold increase, about a 0.5-fold increase to about a 2.5-fold increase, about a 0.5-fold increase to about a 2.4-fold increase, about a 0.5-fold increase to about a 2.2-fold increase, about a 0.5-fold increase to about a 2.0-fold increase, about a 0.5-fold increase to about a 1.8-fold increase, about a 0.5-fold increase to about a 1.6-fold increase, about a 0.5-fold increase to about a 1.5-fold increase, about a 0.5-fold increase to about a 1.4-fold increase, about a 0.5-fold increase to about a 1.2-fold increase, about a 0.5-fold increase to about a 1.0-fold increase, about a 0.5-fold increase to about a 0.9-fold increase, about a 0.5-fold increase to about a 0.8-fold increase, about a 0.5-fold increase to about a 0.7-fold increase, about a 0.6-fold increase to about a 100-fold increase, about 0.6-fold increase to about a 90-fold increase, about 0.6-fold increase to about a 80-fold increase, about a 0.6-fold increase to about a 70-fold increase, about a 0.6-fold increase to about a 60-fold increase, about a 0.6-fold increase to about a 50-fold increase, about a 0.6-fold increase to about a 40-fold increase, about a 0.6-fold increase to about a 30-fold increase, about 0.6-fold increase to about 20-fold increase, about a 0.6-fold increase to about a 10-fold increase, about a 0.6-fold increase to about a 9.5-fold increase, about a 0.6-fold increase to about a 9.0-fold increase, about a 0.6-fold increase to about a 8.5-fold increase, about a 0.6-fold increase to about a 8.0-fold increase, about a 0.6-fold increase to about a 7.5-fold increase, about a 0.6-fold increase to about a 7.0-fold increase, about a 0.6-fold increase to about a 6.5-fold increase, about a 0.6-fold increase to about a 6.0-fold increase, about a 0.6-fold increase to about a 5.5-fold increase, about a 0.6-fold increase to about a 5.0-fold increase, about a 0.6-fold increase to about a 4.5-fold increase, about a 0.6-fold increase to about a 4.0-fold increase, about a 0.6-fold increase to about a 3.5-fold increase, about 0.6-fold increase to about a 3.0-fold increase, about a 0.6-fold increase to about a 2.8-fold increase, about a 0.6-fold increase to about a 2.6-fold increase, about a 0.6-fold increase to about a 2.5-fold increase, about a 0.6-fold increase to about a 2.4-fold increase, about a 0.6-fold increase to about a 2.2-fold increase, about a 0.6-fold increase to about a 2.0-fold increase, about a 0.6-fold increase to about a 1.8-fold increase, about a 0.6-fold increase to about a 1.6-fold increase, about a 0.6-fold increase to about a 1.5-fold increase, about a 0.6-fold increase to about a 1.4-fold increase, about a 0.6-fold increase to about a 1.2-fold increase, about a 0.6-fold increase to about a 1.0-fold increase, about a 0.6-fold increase to about a 0.9-fold increase, about a 0.6-fold increase to about a 0.8-fold increase, about a 0.7-fold increase to about a 100-fold increase, about 0.7-fold increase to about a 90-fold increase, about 0.7-fold increase to about a 80-fold increase, about a 0.7-fold increase to about a 70-fold increase, about a 0.7-fold increase to about a 60-fold increase, about a 0.7-fold increase to about a 50-fold increase, about a 0.7-fold increase to about a 40-fold increase, about a 0.7-fold increase to about a 30-fold increase, about 0.7-fold increase to about 20-fold increase, about a 0.7-fold increase to about a 10-fold increase, about a 0.7-fold increase to about a 9.5-fold increase, about a 0.7-fold increase to about a 9.0-fold increase, about a 0.7-fold increase to about a 8.5-fold increase, about a 0.7-fold increase to about a 8.0-fold increase, about a 0.7-fold increase to about a 7.5-fold increase, about a 0.7-fold increase to about a 7.0-fold increase, about a 0.7-fold increase to about a 6.5-fold increase, about a 0.7-fold increase to about a 6.0-fold increase, about a 0.7-fold increase to about a 5.5-fold increase, about a 0.7-fold increase to about a 5.0-fold increase, about a 0.7-fold increase to about a 4.5-fold increase, about a 0.7-fold increase to about a 4.0-fold increase, about a 0.7-fold increase to about a 3.5-fold increase, about 0.7-fold increase to about a 3.0-fold increase, about a 0.7-fold increase to about a 2.8-fold increase, about a 0.7-fold increase to about a 2.6-fold increase, about a 0.7-fold increase to about a 2.5-fold increase, about a 0.7-fold increase to about a 2.4-fold increase, about a 0.7-fold increase to about a 2.2-fold increase, about a 0.7-fold increase to about a 2.0-fold increase, about a 0.7-fold increase to about a 1.8-fold increase, about a 0.7-fold increase to about a 1.6-fold increase, about a 0.7-fold increase to about a 1.5-fold increase, about a 0.7-fold increase to about a 1.4-fold increase, about a 0.7-fold increase to about a 1.2-fold increase, about a 0.7-fold increase to about a 1.0-fold increase, about a 0.7-fold increase to about a 0.9-fold increase, about a 0.8-fold increase to about a 100-fold increase, about 0.8-fold increase to about a 90-fold increase, about 0.8-fold increase to about a 80-fold increase, about a 0.8-fold increase to about a 70-fold increase, about a 0.8-fold increase to about a 60-fold increase, about a 0.8-fold increase to about a 50-fold increase, about a 0.8-fold increase to about a 40-fold increase, about a 0.8-fold increase to about a 30-fold increase, about 0.8-fold increase to about 20-fold increase, about a 0.8-fold increase to about a 10-fold increase, about a 0.8-fold increase to about a 9.5-fold increase, about a 0.8-fold increase to about a 9.0-fold increase, about a 0.8-fold increase to about a 8.5-fold increase, about a 0.8-fold increase to about a 8.0-fold increase, about a 0.8-fold increase to about a 7.5-fold increase, about a 0.8-fold increase to about a 7.0-fold increase, about a 0.8-fold increase to about a 6.5-fold increase, about a 0.8-fold increase to about a 6.0-fold increase, about a 0.8-fold increase to about a 5.5-fold increase, about a 0.8-fold increase to about a 5.0-fold increase, about a 0.8-fold increase to about a 4.5-fold increase, about a 0.8-fold increase to about a 4.0-fold increase, about a 0.8-fold increase to about a 3.5-fold increase, about 0.8-fold increase to about a 3.0-fold increase, about a 0.8-fold increase to about a 2.8-fold increase, about a 0.8-fold increase to about a 2.6-fold increase, about a 0.8-fold increase to about a 2.5-fold increase, about a 0.8-fold increase to about a 2.4-fold increase, about a 0.8-fold increase to about a 2.2-fold increase, about a 0.8-fold increase to about a 2.0-fold increase, about a 0.8-fold increase to about a 1.8-fold increase, about a 0.8-fold increase to about a 1.6-fold increase, about a 0.8-fold increase to about a 1.5-fold increase, about a 0.8-fold increase to about a 1.4-fold increase, about a 0.8-fold increase to about a 1.2-fold increase, about a 0.8-fold increase to about a 1.0-fold increase, about a 1.0-fold increase to about a 100-fold increase, about 1.0-fold increase to about a 90-fold increase, about 1.0-fold increase to about a 80-fold increase, about a 1.0-fold increase to about a 70-fold increase, about a 1.0-fold increase to about a 60-fold increase, about a 1.0-fold increase to about a 50-fold increase, about a 1.0-fold increase to about a 40-fold increase, about a 1.0-fold increase to about a 30-fold increase, about 1.0-fold increase to about 20-fold increase, about a 1.0-fold increase to about a 10-fold increase, about a 1.0-fold increase to about a 9.5-fold increase, about a 1.0-fold increase to about a 9.0-fold increase, about a 1.0-fold increase to about a 8.5-fold increase, about a 1.0-fold increase to about a 8.0-fold increase, about a 1.0-fold increase to about a 7.5-fold increase, about a 1.0-fold increase to about a 7.0-fold increase, about a 1.0-fold increase to about a 6.5-fold increase, about a 1.0-fold increase to about a 6.0-fold increase, about a 1.0-fold increase to about a 5.5-fold increase, about a 1.0-fold increase to about a 5.0-fold increase, about a 1.0-fold increase to about a 4.5-fold increase, about a 1.0-fold increase to about a 4.0-fold increase, about a 1.0-fold increase to about a 3.5-fold increase, about 1.0-fold increase to about a 3.0-fold increase, about a 1.0-fold increase to about a 2.8-fold increase, about a 1.0-fold increase to about a 2.6-fold increase, about a 1.0-fold increase to about a 2.5-fold increase, about a 1.0-fold increase to about a 2.4-fold increase, about a 1.0-fold increase to about a 2.2-fold increase, about a 1.0-fold increase to about a 2.0-fold increase, about a 1.0-fold increase to about a 1.8-fold increase, about a 1.0-fold increase to about a 1.6-fold increase, about a 1.0-fold increase to about a 1.5-fold increase, about a 1.0-fold increase to about a 1.4-fold increase, about a 1.0-fold increase to about a 1.2-fold increase, about a 1.2-fold increase to about a 100-fold increase, about 1.2-fold increase to about a 90-fold increase, about 1.2-fold increase to about a 80-fold increase, about a 1.2-fold increase to about a 70-fold increase, about a 1.2-fold increase to about a 60-fold increase, about a 1.2-fold increase to about a 50-fold increase, about a 1.2-fold increase to about a 40-fold increase, about a 1.2-fold increase to about a 30-fold increase, about 1.2-fold increase to about 20-fold increase, about a 1.2-fold increase to about a 10-fold increase, about a 1.2-fold increase to about a 9.5-fold increase, about a 1.2-fold increase to about a 9.0-fold increase, about a 1.2-fold increase to about a 8.5-fold increase, about a 1.2-fold increase to about a 8.0-fold increase, about a 1.2-fold increase to about a 7.5-fold increase, about a 1.2-fold increase to about a 7.0-fold increase, about a 1.2-fold increase to about a 6.5-fold increase, about a 1.2-fold increase to about a 6.0-fold increase, about a 1.2-fold increase to about a 5.5-fold increase, about a 1.2-fold increase to about a 5.0-fold increase, about a 1.2-fold increase to about a 4.5-fold increase, about a 1.2-fold increase to about a 4.0-fold increase, about a 1.2-fold increase to about a 3.5-fold increase, about 1.2-fold increase to about a 3.0-fold increase, about a 1.2-fold increase to about a 2.8-fold increase, about a 1.2-fold increase to about a 2.6-fold increase, about a 1.2-fold increase to about a 2.5-fold increase, about a 1.2-fold increase to about a 2.4-fold increase, about a 1.2-fold increase to about a 2.2-fold increase, about a 1.2-fold increase to about a 2.0-fold increase, about a 1.2-fold increase to about a 1.8-fold increase, about a 1.2-fold increase to about a 1.6-fold increase, about a 1.2-fold increase to about a 1.5-fold increase, about a 1.2-fold increase to about a 1.4-fold increase, about a 1.4-fold increase to about a 100-fold increase, about 1.4-fold increase to about a 90-fold increase, about 1.4-fold increase to about a 80-fold increase, about a 1.4-fold increase to about a 70-fold increase, about a 1.4-fold increase to about a 60-fold increase, about a 1.4-fold increase to about a 50-fold increase, about a 1.4-fold increase to about a 40-fold increase, about a 1.4-fold increase to about a 30-fold increase, about 1.4-fold increase to about 20-fold increase, about a 1.4-fold increase to about a 10-fold increase, about a 1.4-fold increase to about a 9.5-fold increase, about a 1.4-fold increase to about a 9.0-fold increase, about a 1.4-fold increase to about a 8.5-fold increase, about a 1.4-fold increase to about a 8.0-fold increase, about a 1.4-fold increase to about a 7.5-fold increase, about a 1.4-fold increase to about a 7.0-fold increase, about a 1.4-fold increase to about a 6.5-fold increase, about a 1.4-fold increase to about a 6.0-fold increase, about a 1.4-fold increase to about a 5.5-fold increase, about a 1.4-fold increase to about a 5.0-fold increase, about a 1.4-fold increase to about a 4.5-fold increase, about a 1.4-fold increase to about a 4.0-fold increase, about a 1.4-fold increase to about a 3.5-fold increase, about 1.4-fold increase to about a 3.0-fold increase, about a 1.4-fold increase to about a 2.8-fold increase, about a 1.4-fold increase to about a 2.6-fold increase, about a 1.4-fold increase to about a 2.5-fold increase, about a 1.4-fold increase to about a 2.4-fold increase, about a 1.4-fold increase to about a 2.2-fold increase, about a 1.4-fold increase to about a 2.0-fold increase, about a 1.4-fold increase to about a 1.8-fold increase, about a 1.4-fold increase to about a 1.6-fold increase, about a 1.6-fold increase to about a 10-fold increase, about a 1.6-fold increase to about a 100-fold increase, about 1.6-fold increase to about a 90-fold increase, about 1.6-fold increase to about a 80-fold increase, about a 1.6-fold increase to about a 70-fold increase, about a 1.6-fold increase to about a 60-fold increase, about a 1.6-fold increase to about a 50-fold increase, about a 1.6-fold increase to about a 40-fold increase, about a 1.6-fold increase to about a 30-fold increase, about 1.6-fold increase to about 20-fold increase, about a 1.6-fold increase to about a 9.5-fold increase, about a 1.6-fold increase to about a 9.0-fold increase, about a 1.6-fold increase to about a 8.5-fold increase, about a 1.6-fold increase to about a 8.0-fold increase, about a 1.6-fold increase to about a 7.5-fold increase, about a 1.6-fold increase to about a 7.0-fold increase, about a 1.6-fold increase to about a 6.5-fold increase, about a 1.6-fold increase to about a 6.0-fold increase, about a 1.6-fold increase to about a 5.5-fold increase, about a 1.6-fold increase to about a 5.0-fold increase, about a 1.6-fold increase to about a 4.5-fold increase, about a 1.6-fold increase to about a 4.0-fold increase, about a 1.6-fold increase to about a 3.5-fold increase, about 1.6-fold increase to about a 3.0-fold increase, about a 1.6-fold increase to about a 2.8-fold increase, about a 1.6-fold increase to about a 2.6-fold increase, about a 1.6-fold increase to about a 2.5-fold increase, about a 1.6-fold increase to about a 2.4-fold increase, about a 1.6-fold increase to about a 2.2-fold increase, about a 1.6-fold increase to about a 2.0-fold increase, about a 1.6-fold increase to about a 1.8-fold increase, about a 1.8-fold increase to about a 100-fold increase, about 1.8-fold increase to about a 90-fold increase, about 1.8-fold increase to about a 80-fold increase, about a 1.8-fold increase to about a 70-fold increase, about a 1.8-fold increase to about a 60-fold increase, about a 1.8-fold increase to about a 50-fold increase, about a 1.8-fold increase to about a 40-fold increase, about a 1.8-fold increase to about a 30-fold increase, about 1.8-fold increase to about 20-fold increase, about a 1.8-fold increase to about a 10-fold increase, about a 1.8-fold increase to about a 9.5-fold increase, about a 1.8-fold increase to about a 9.0-fold increase, about a 1.8-fold increase to about a 8.5-fold increase, about a 1.8-fold increase to about a 8.0-fold increase, about a 1.8-fold increase to about a 7.5-fold increase, about a 1.8-fold increase to about a 7.0-fold increase, about a 1.8-fold increase to about a 6.5-fold increase, about a 1.8-fold increase to about a 6.0-fold increase, about a 1.8-fold increase to about a 5.5-fold increase, about a 1.8-fold increase to about a 5.0-fold increase, about a 1.8-fold increase to about a 4.5-fold increase, about a 1.8-fold increase to about a 4.0-fold increase, about a 1.8-fold increase to about a 3.5-fold increase, about 1.8-fold increase to about a 3.0-fold increase, about a 1.8-fold increase to about a 2.8-fold increase, about a 1.8-fold increase to about a 2.6-fold increase, about a 1.8-fold increase to about a 2.5-fold increase, about a 1.8-fold increase to about a 2.4-fold increase, about a 1.8-fold increase to about a 2.2-fold increase, about a 1.8-fold increase to about a 2.0-fold increase, about a 2.0-fold increase to about a 100-fold increase, about 2.0-fold increase to about a 90-fold increase, about 2.0-fold increase to about a 80-fold increase, about a 2.0-fold increase to about a 70-fold increase, about a 2.0-fold increase to about a 60-fold increase, about a 2.0-fold increase to about a 50-fold increase, about a 2.0-fold increase to about a 40-fold increase, about a 2.0-fold increase to about a 30-fold increase, about 2.0-fold increase to about 20-fold increase, about a 2.0-fold increase to about a 10-fold increase, about a 2.0-fold increase to about a 9.5-fold increase, about a 2.0-fold increase to about a 9.0-fold increase, about a 2.0-fold increase to about a 8.5-fold increase, about a 2.0-fold increase to about a 8.0-fold increase, about a 2.0-fold increase to about a 7.5-fold increase, about a 2.0-fold increase to about a 7.0-fold increase, about a 2.0-fold increase to about a 6.5-fold increase, about a 2.0-fold increase to about a 6.0-fold increase, about a 2.0-fold increase to about a 5.5-fold increase, about a 2.0-fold increase to about a 5.0-fold increase, about a 2.0-fold increase to about a 4.5-fold increase, about a 2.0-fold increase to about a 4.0-fold increase, about a 2.0-fold increase to about a 3.5-fold increase, about 2.0-fold increase to about a 3.0-fold increase, about a 2.0-fold increase to about a 2.8-fold increase, about a 2.0-fold increase to about a 2.6-fold increase, about a 2.0-fold increase to about a 2.5-fold increase, about a 2.0-fold increase to about a 2.4-fold increase, about a 2.0-fold increase to about a 2.2-fold increase, about a 2.2-fold increase to about a 100-fold increase, about 2.2-fold increase to about a 90-fold increase, about 2.2-fold increase to about a 80-fold increase, about a 2.2-fold increase to about a 70-fold increase, about a 2.2-fold increase to about a 60-fold increase, about a 2.2-fold increase to about a 50-fold increase, about a 2.2-fold increase to about a 40-fold increase, about a 2.2-fold increase to about a 30-fold increase, about 2.2-fold increase to about 20-fold increase, about a 2.2-fold increase to about a 10-fold increase, about a 2.2-fold increase to about a 9.5-fold increase, about a 2.2-fold increase to about a 9.0-fold increase, about a 2.2-fold increase to about a 8.5-fold increase, about a 2.2-fold increase to about a 8.0-fold increase, about a 2.2-fold increase to about a 7.5-fold increase, about a 2.2-fold increase to about a 7.0-fold increase, about a 2.2-fold increase to about a 6.5-fold increase, about a 2.2-fold increase to about a 6.0-fold increase, about a 2.2-fold increase to about a 5.5-fold increase, about a 2.2-fold increase to about a 5.0-fold increase, about a 2.2-fold increase to about a 4.5-fold increase, about a 2.2-fold increase to about a 4.0-fold increase, about a 2.2-fold increase to about a 3.5-fold increase, about 2.2-fold increase to about a 3.0-fold increase, about a 2.2-fold increase to about a 2.8-fold increase, about a 2.2-fold increase to about a 2.6-fold increase, about a 2.2-fold increase to about a 2.5-fold increase, about a 2.2-fold increase to about a 2.4-fold increase, about a 2.4-fold increase to about a 100-fold increase, about 2.4-fold increase to about a 90-fold increase, about 2.4-fold increase to about a 80-fold increase, about a 2.4-fold increase to about a 70-fold increase, about a 2.4-fold increase to about a 60-fold increase, about a 2.4-fold increase to about a 50-fold increase, about a 2.4-fold increase to about a 40-fold increase, about a 2.4-fold increase to about a 30-fold increase, about 2.4-fold increase to about 20-fold increase, about a 2.4-fold increase to about a 10-fold increase, about a 2.4-fold increase to about a 9.5-fold increase, about a 2.4-fold increase to about a 9.0-fold increase, about a 2.4-fold increase to about a 8.5-fold increase, about a 2.4-fold increase to about a 8.0-fold increase, about a 2.4-fold increase to about a 7.5-fold increase, about a 2.4-fold increase to about a 7.0-fold increase, about a 2.4-fold increase to about a 6.5-fold increase, about a 2.4-fold increase to about a 6.0-fold increase, about a 2.4-fold increase to about a 5.5-fold increase, about a 2.4-fold increase to about a 5.0-fold increase, about a 2.4-fold increase to about a 4.5-fold increase, about a 2.4-fold increase to about a 4.0-fold increase, about a 2.4-fold increase to about a 3.5-fold increase, about 2.4-fold increase to about a 3.0-fold increase, about a 2.4-fold increase to about a 2.8-fold increase, about a 2.4-fold increase to about a 2.6-fold increase, about a 2.6-fold increase to about a 100-fold increase, about 2.6-fold increase to about a 90-fold increase, about 2.6-fold increase to about a 80-fold increase, about a 2.6-fold increase to about a 70-fold increase, about a 2.6-fold increase to about a 60-fold increase, about a 2.6-fold increase to about a 50-fold increase, about a 2.6-fold increase to about a 40-fold increase, about a 2.6-fold increase to about a 30-fold increase, about 2.6-fold increase to about 20-fold increase, about a 2.6-fold increase to about a 10-fold increase, about a 2.6-fold increase to about a 9.5-fold increase, about a 2.6-fold increase to about a 9.0-fold increase, about a 2.6-fold increase to about a 8.5-fold increase, about a 2.6-fold increase to about a 8.0-fold increase, about a 2.6-fold increase to about a 7.5-fold increase, about a 2.6-fold increase to about a 7.0-fold increase, about a 2.6-fold increase to about a 6.5-fold increase, about a 2.6-fold increase to about a 6.0-fold increase, about a 2.6-fold increase to about a 5.5-fold increase, about a 2.6-fold increase to about a 5.0-fold increase, about a 2.6-fold increase to about a 4.5-fold increase, about a 2.6-fold increase to about a 4.0-fold increase, about a 2.6-fold increase to about a 3.5-fold increase, about 2.6-fold increase to about a 3.0-fold increase, about a 2.6-fold increase to about a 2.8-fold increase, about a 2.8-fold increase to about a 100-fold increase, about 2.8-fold increase to about a 90-fold increase, about 2.8-fold increase to about a 80-fold increase, about a 2.8-fold increase to about a 70-fold increase, about a 2.8-fold increase to about a 60-fold increase, about a 2.8-fold increase to about a 50-fold increase, about a 2.8-fold increase to about a 40-fold increase, about a 2.8-fold increase to about a 30-fold increase, about 2.8-fold increase to about 20-fold increase, about a 2.8-fold increase to about a 10-fold increase, about a 2.8-fold increase to about a 9.5-fold increase, about a 2.8-fold increase to about a 9.0-fold increase, about a 2.8-fold increase to about a 8.5-fold increase, about a 2.8-fold increase to about a 8.0-fold increase, about a 2.8-fold increase to about a 7.5-fold increase, about a 2.8-fold increase to about a 7.0-fold increase, about a 2.8-fold increase to about a 6.5-fold increase, about a 2.8-fold increase to about a 6.0-fold increase, about a 2.8-fold increase to about a 5.5-fold increase, about a 2.8-fold increase to about a 5.0-fold increase, about a 2.8-fold increase to about a 4.5-fold increase, about a 2.8-fold increase to about a 4.0-fold increase, about a 2.8-fold increase to about a 3.5-fold increase, about 2.8-fold increase to about a 3.0-fold increase, about a 3.0-fold increase to about a 100-fold increase, about 3.0-fold increase to about a 90-fold increase, about 3.0-fold increase to about a 80-fold increase, about a 3.0-fold increase to about a 70-fold increase, about a 3.0-fold increase to about a 60-fold increase, about a 3.0-fold increase to about a 50-fold increase, about a 3.0-fold increase to about a 40-fold increase, about a 3.0-fold increase to about a 30-fold increase, about 3.0-fold increase to about 20-fold increase, about a 3.0-fold increase to about a 10-fold increase, about a 3.0-fold increase to about a 9.5-fold increase, about a 3.0-fold increase to about a 9.0-fold increase, about a 3.0-fold increase to about a 8.5-fold increase, about a 3.0-fold increase to about a 8.0-fold increase, about a 3.0-fold increase to about a 7.5-fold increase, about a 3.0-fold increase to about a 7.0-fold increase, about a 3.0-fold increase to about a 6.5-fold increase, about a 3.0-fold increase to about a 6.0-fold increase, about a 3.0-fold increase to about a 5.5-fold increase, about a 3.0-fold increase to about a 5.0-fold increase, about a 3.0-fold increase to about a 4.5-fold increase, about a 3.0-fold increase to about a 4.0-fold increase, about a 3.0-fold increase to about a 3.5-fold increase, about a 3.5-fold increase to about a 100-fold increase, about 3.5-fold increase to about a 90-fold increase, about 3.5-fold increase to about a 80-fold increase, about a 3.5-fold increase to about a 70-fold increase, about a 3.5-fold increase to about a 60-fold increase, about a 3.5-fold increase to about a 50-fold increase, about a 3.5-fold increase to about a 40-fold increase, about a 3.5-fold increase to about a 30-fold increase, about 3.5-fold increase to about 20-fold increase, about a 3.5-fold increase to about a 10-fold increase, about a 3.5-fold increase to about a 9.5-fold increase, about a 3.5-fold increase to about a 9.0-fold increase, about a 3.5-fold increase to about a 8.5-fold increase, about a 3.5-fold increase to about a 8.0-fold increase, about a 3.5-fold increase to about a 7.5-fold increase, about a 3.5-fold increase to about a 7.0-fold increase, about a 3.5-fold increase to about a 6.5-fold increase, about a 3.5-fold increase to about a 6.0-fold increase, about a 3.5-fold increase to about a 5.5-fold increase, about a 3.5-fold increase to about a 5.0-fold increase, about a 3.5-fold increase to about a 4.5-fold increase, about a 3.5-fold increase to about a 4.0-fold increase, about a 4.0-fold increase to about a 100-fold increase, about 4.0-fold increase to about a 90-fold increase, about 4.0-fold increase to about a 80-fold increase, about a 4.0-fold increase to about a 70-fold increase, about a 4.0-fold increase to about a 60-fold increase, about a 4.0-fold increase to about a 50-fold increase, about a 4.0-fold increase to about a 40-fold increase, about a 4.0-fold increase to about a 30-fold increase, about 4.0-fold increase to about 20-fold increase, about a 4.0-fold increase to about a 10-fold increase, about a 4.0-fold increase to about a 9.5-fold increase, about a 4.0-fold increase to about a 9.0-fold increase, about a 4.0-fold increase to about a 8.5-fold increase, about a 4.0-fold increase to about a 8.0-fold increase, about a 4.0-fold increase to about a 7.5-fold increase, about a 4.0-fold increase to about a 7.0-fold increase, about a 4.0-fold increase to about a 6.5-fold increase, about a 4.0-fold increase to about a 6.0-fold increase, about a 4.0-fold increase to about a 5.5-fold increase, about a 4.0-fold increase to about a 5.0-fold increase, about a 4.0-fold increase to about a 4.5-fold increase, about a 4.5-fold increase to about a 100-fold increase, about 4.5-fold increase to about a 90-fold increase, about 4.5-fold increase to about a 80-fold increase, about a 4.5-fold increase to about a 70-fold increase, about a 4.5-fold increase to about a 60-fold increase, about a 4.5-fold increase to about a 50-fold increase, about a 4.5-fold increase to about a 40-fold increase, about a 4.5-fold increase to about a 30-fold increase, about 4.5-fold increase to about 20-fold increase, about a 4.5-fold increase to about a 10-fold increase, about a 4.5-fold increase to about a 9.5-fold increase, about a 4.5-fold increase to about a 9.0-fold increase, about a 4.5-fold increase to about a 8.5-fold increase, about a 4.5-fold increase to about a 8.0-fold increase, about a 4.5-fold increase to about a 7.5-fold increase, about a 4.5-fold increase to about a 7.0-fold increase, about a 4.5-fold increase to about a 6.5-fold increase, about a 4.5-fold increase to about a 6.0-fold increase, about a 4.5-fold increase to about a 5.5-fold increase, about a 4.5-fold increase to about a 5.0-fold increase, about a 5.0-fold increase to about a 100-fold increase, about 5.0-fold increase to about a 90-fold increase, about 5.0-fold increase to about a 80-fold increase, about a 5.0-fold increase to about a 70-fold increase, about a 5.0-fold increase to about a 60-fold increase, about a 5.0-fold increase to about a 50-fold increase, about a 5.0-fold increase to about a 40-fold increase, about a 5.0-fold increase to about a 30-fold increase, about 5.0-fold increase to about 20-fold increase, about a 5.0-fold increase to about a 10-fold increase, about a 5.0-fold increase to about a 9.5-fold increase, about a 5.0-fold increase to about a 9.0-fold increase, about a 5.0-fold increase to about a 8.5-fold increase, about a 5.0-fold increase to about a 8.0-fold increase, about a 5.0-fold increase to about a 7.5-fold increase, about a 5.0-fold increase to about a 7.0-fold increase, about a 5.0-fold increase to about a 6.5-fold increase, about a 5.0-fold increase to about a 6.0-fold increase, about a 5.0-fold increase to about a 5.5-fold increase, about a 5.5-fold increase to about a 100-fold increase, about 5.5-fold increase to about a 90-fold increase, about 5.5-fold increase to about a 80-fold increase, about a 5.5-fold increase to about a 70-fold increase, about a 5.5-fold increase to about a 60-fold increase, about a 5.5-fold increase to about a 50-fold increase, about a 5.5-fold increase to about a 40-fold increase, about a 5.5-fold increase to about a 30-fold increase, about 5.5-fold increase to about 20-fold increase, about a 5.5-fold increase to about a 10-fold increase, about a 5.5-fold increase to about a 9.5-fold increase, about a 5.5-fold increase to about a 9.0-fold increase, about a 5.5-fold increase to about a 8.5-fold increase, about a 5.5-fold increase to about a 8.0-fold increase, about a 5.5-fold increase to about a 7.5-fold increase, about a 5.5-fold increase to about a 7.0-fold increase, about a 5.5-fold increase to about a 6.5-fold increase, about a 5.5-fold increase to about a 6.0-fold increase, about a 6.0-fold increase to about a 100-fold increase, about 6.0-fold increase to about a 90-fold increase, about 6.0-fold increase to about a 80-fold increase, about a 6.0-fold increase to about a 70-fold increase, about a 6.0-fold increase to about a 60-fold increase, about a 6.0-fold increase to about a 50-fold increase, about a 6.0-fold increase to about a 40-fold increase, about a 6.0-fold increase to about a 30-fold increase, about 6.0-fold increase to about 20-fold increase, about a 6.0-fold increase to about a 10-fold increase, about a 6.0-fold increase to about a 9.5-fold increase, about a 6.0-fold increase to about a 9.0-fold increase, about a 6.0-fold increase to about a 8.5-fold increase, about a 6.0-fold increase to about a 8.0-fold increase, about a 6.0-fold increase to about a 7.5-fold increase, about a 6.0-fold increase to about a 7.0-fold increase, about a 6.0-fold increase to about a 6.5-fold increase, about a 6.5-fold increase to about a 100-fold increase, about 6.5-fold increase to about a 90-fold increase, about 6.5-fold increase to about a 80-fold increase, about a 6.5-fold increase to about a 70-fold increase, about a 6.5-fold increase to about a 60-fold increase, about a 6.5-fold increase to about a 50-fold increase, about a 6.5-fold increase to about a 40-fold increase, about a 6.5-fold increase to about a 30-fold increase, about 6.5-fold increase to about 20-fold increase, about a 6.5-fold increase to about a 10-fold increase, about a 6.5-fold increase to about a 9.5-fold increase, about a 6.5-fold increase to about a 9.0-fold increase, about a 6.5-fold increase to about a 8.5-fold increase, about a 6.5-fold increase to about a 8.0-fold increase, about a 6.5-fold increase to about a 7.5-fold increase, about a 6.5-fold increase to about a 7.0-fold increase, about a 7.0-fold increase to about a 100-fold increase, about 7.0-fold increase to about a 90-fold increase, about 7.0-fold increase to about a 80-fold increase, about a 7.0-fold increase to about a 70-fold increase, about a 7.0-fold increase to about a 60-fold increase, about a 7.0-fold increase to about a 50-fold increase, about a 7.0-fold increase to about a 40-fold increase, about a 7.0-fold increase to about a 30-fold increase, about 7.0-fold increase to about 20-fold increase, about a 7.0-fold increase to about a 10-fold increase, about a 7.0-fold increase to about a 9.5-fold increase, about a 7.0-fold increase to about a 9.0-fold increase, about a 7.0-fold increase to about a 8.5-fold increase, about a 7.0-fold increase to about a 8.0-fold increase, about a 7.0-fold increase to about a 7.5-fold increase, about a 7.5-fold increase to about a 100-fold increase, about 7.5-fold increase to about a 90-fold increase, about 7.5-fold increase to about a 80-fold increase, about a 7.5-fold increase to about a 70-fold increase, about a 7.5-fold increase to about a 60-fold increase, about a 7.5-fold increase to about a 50-fold increase, about a 7.5-fold increase to about a 40-fold increase, about a 7.5-fold increase to about a 30-fold increase, about 7.5-fold increase to about 20-fold increase, about a 7.5-fold increase to about a 10-fold increase, about a 7.5-fold increase to about a 9.5-fold increase, about a 7.5-fold increase to about a 9.0-fold increase, about a 7.5-fold increase to about a 8.5-fold increase, about a 7.5-fold increase to about a 8.0-fold increase, about a 8.0-fold increase to about a 100-fold increase, about 8.0-fold increase to about a 90-fold increase, about 8.0-fold increase to about a 80-fold increase, about a 8.0-fold increase to about a 70-fold increase, about a 8.0-fold increase to about a 60-fold increase, about a 8.0-fold increase to about a 50-fold increase, about a 8.0-fold increase to about a 40-fold increase, about a 8.0-fold increase to about a 30-fold increase, about 8.0-fold increase to about 20-fold increase, about a 8.0-fold increase to about a 10-fold increase, about a 8.0-fold increase to about a 9.5-fold increase, about a 8.0-fold increase to about a 9.0-fold increase, about a 8.0-fold increase to about a 8.5-fold increase, about a 8.5-fold increase to about a 100-fold increase, about 8.5-fold increase to about a 90-fold increase, about 8.5-fold increase to about a 80-fold increase, about a 8.5-fold increase to about a 70-fold increase, about a 8.5-fold increase to about a 60-fold increase, about a 8.5-fold increase to about a 50-fold increase, about a 8.5-fold increase to about a 40-fold increase, about a 8.5-fold increase to about a 30-fold increase, about 8.5-fold increase to about 20-fold increase, about a 8.5-fold increase to about a 10-fold increase, about a 8.5-fold increase to about a 9.5-fold increase, about a 8.5-fold increase to about a 9.0-fold increase, about a 9.0-fold increase to about a 100-fold increase, about 9.0-fold increase to about a 90-fold increase, about 9.0-fold increase to about a 80-fold increase, about a 9.0-fold increase to about a 70-fold increase, about a 9.0-fold increase to about a 60-fold increase, about a 9.0-fold increase to about a 50-fold increase, about a 9.0-fold increase to about a 40-fold increase, about a 9.0-fold increase to about a 30-fold increase, about 9.0-fold increase to about 20-fold increase, about a 9.0-fold increase to about a 10-fold increase, about a 9.0-fold increase to about a 9.5-fold increase, about a 9.5-fold increase to about a 100-fold increase, about 9.5-fold increase to about a 90-fold increase, about 9.5-fold increase to about a 80-fold increase, about a 9.5-fold increase to about a 70-fold increase, about a 9.5-fold increase to about a 60-fold increase, about a 9.5-fold increase to about a 50-fold increase, about a 9.5-fold increase to about a 40-fold increase, about a 9.5-fold increase to about a 30-fold increase, about 9.5-fold increase to about 20-fold increase, about a 9.5-fold increase to about a 10-fold increase, about a 10-fold increase to about a 100-fold increase, about 10-fold increase to about a 90-fold increase, about 10-fold increase to about a 80-fold increase, about a 10-fold increase to about a 70-fold increase, about a 10-fold increase to about a 60-fold increase, about a 10-fold increase to about a 50-fold increase, about a 10-fold increase to about a 40-fold increase, about a 10-fold increase to about a 30-fold increase, about 10-fold increase to about 20-fold increase, about a 20-fold increase to about a 100-fold increase, about 20-fold increase to about a 90-fold increase, about 20-fold increase to about a 80-fold increase, about a 20-fold increase to about a 70-fold increase, about a 20-fold increase to about a 60-fold increase, about a 20-fold increase to about a 50-fold increase, about a 20-fold increase to about a 40-fold increase, about a 20-fold increase to about a 30-fold increase, about a 30-fold increase to about a 100-fold increase, about 30-fold increase to about a 90-fold increase, about 30-fold increase to about a 80-fold increase, about a 30-fold increase to about a 70-fold increase, about a 30-fold increase to about a 60-fold increase, about a 30-fold increase to about a 50-fold increase, about a 30-fold increase to about a 40-fold increase, about a 40-fold increase to about a 100-fold increase, about 40-fold increase to about a 90-fold increase, about 40-fold increase to about a 80-fold increase, about a 40-fold increase to about a 70-fold increase, about a 40-fold increase to about a 60-fold increase, about a 40-fold increase to about a 50-fold increase, about a 50-fold increase to about a 100-fold increase, about 50-fold increase to about a 90-fold increase, about 50-fold increase to about a 80-fold increase, about a 50-fold increase to about a 70-fold increase, about a 50-fold increase to about a 60-fold increase, about a 60-fold increase to about a 100-fold increase, about 60-fold increase to about a 90-fold increase, about 60-fold increase to about a 80-fold increase, about a 60-fold increase to about a 70-fold increase, about a 70-fold increase to about a 100-fold increase, about 70-fold increase to about a 90-fold increase, about 70-fold increase to about a 80-fold increase, about a 80-fold increase to about a 100-fold increase, about 80-fold increase to about a 90-fold increase, or about a 90-fold increase to about a 100-fold increase) in toxin liberation in the target mammalian cell (e.g., any of the target mammalian cells described herein) as compared to a composition including the same amount of a control ABPC (e.g., any of the exemplary control ABPCs described herein).

[0564] In some examples of any of the ABPCs described herein, a composition including the ABPC (e.g., any of the ABPCs described herein) can provide for an increase (e.g., a detectable increase) (e.g., at least a 1% increase, at least a 2% increase, at least a 5% increase, at least a 10% increase, at least a 15% increase, at least a 20% increase, at least a 25% increase, at least a 30% increase, at least a 35% increase, at least a 40% increase, at least a 45% increase, at least a 50% increase, at least a 55% increase, at least a 60% increase, at least a 65% increase, at least a 70% increase, at least a 75% increase, at least a 80% increase, at least a 85% increase, at least a 90% increase, at least a 95% increase, at least a 100% increase, at least a 120% increase, at least a 140% increase, at least a 160% increase, at least a 180% increase, at least a 200% increase, at least a 250% increase, at least a 300% increase, at least a 350% increase, at least a 400% increase, at least a 450% increase, at least a 500% increase, at least a 1,000% increase, at least a 2,000% increase, at least a 3,000% increase, at least a 4,000% increase, at least a 5,000% increase, at least a 6,000% increase, at least a 7,000% increase, at least a 8,000% increase, at a least a 9,000% increase, or at least a 10,000% increase, or about a 1% increase to about a 10,000% increase (e.g., or any of the subranges of this range described herein)) in target mammalian cell killing (e.g., any of the exemplary target mammalian cells described herein) as compared to a composition including the same amount of a control ABPC (e.g., any of the exemplary control ABPCs described herein).

[0565] In some examples of any of the ABPCs described herein, a composition including the ABPC (e.g., any of the ABPCs described herein) can provide for an increase (e.g., a detectable increase) (e.g., at least a 0.1-fold increase, at least a 0.2-fold increase, at least a 0.3-fold increase, at least a 0.4-fold increase, at least a 0.5-fold increase, at least a 0.6-fold increase, at least a 0.7-fold increase, at least a 0.8-fold increase, at least a 0.9-fold increase, at least a 1.0-fold increase, at least a 1.2-fold increase, at least a 1.4-fold increase, at least a 1.5-fold increase, at least a 1.6-fold increase, at least a 1.8-fold increase, at least a 2.0-fold increase, at least a 2.2-fold increase, at least a 2.4-fold increase, at least a 2.5-fold increase, at least a 2.6-fold increase, at least a 2.8-fold increase, at least a 3.0-fold increase, at least a 3.5-fold increase, at least a 4.0-fold increase, at least a 4.5-fold increase, at least a 5.0-fold increase, at least a 5.5-fold increase, at least a 6.0-fold increase, at least a 6.5-fold increase, at least a 7.0-fold increase, at least a 7.5-fold increase, at least a 8.0-fold increase, at least a 8.5-fold increase, at least a 9.0-fold increase, at least a 9.5-fold increase, at least a 10-fold increase, at least a 15-fold increase, at least a 20-fold increase, at least a 25-fold increase, at least a 30-fold increase, at least a 35-fold increase, at least a 40-fold increase, at least a 40-fold increase, at least a 45-fold increase, at least a 50-fold increase, at least a 55-fold increase, at least a 60-fold increase, at least a 65-fold increase, at least a 70-fold increase, at least a 80-fold increase, at least a 85-fold increase, at least a 90-fold increase, at least a 95-fold increase, or at least a 100-fold increase, or about a 0.1-fold increase to about a 100-fold increase (or any of the subranges of this range described herein)) in target mammalian cell killing (e.g., any of the exemplary target mammalian cells described herein) as compared to a composition including the same amount of a control ABPC (e.g., any of the exemplary control ABPCs described herein).

[0566] In some examples of any of the ABPCs described herein, a composition including any of the ABPCs described herein (e.g., upon contacting target mammalian cells presenting CD22 on their surface) results in decreased (e.g., at least a 1% decrease, at least a 5% decrease, at least a 10% decrease, at least a 15% decrease, at least a 20% decrease, at least a 25% decrease, at least a 30% decrease, at least a 35% decrease, at least a 40% decrease, at least a 45% decrease, at least a 50% decrease, at least a 55% decrease, at least a 60% decrease, at least a 65% decrease, at least a 70% decrease, at least a 75% decrease, at least a 80% decrease, at least a 85% decrease, at least a 90% decrease, at least a 95% decrease, or at least a 99% decrease, about a 1% decrease to about a 99% decrease, or any of the subranges of this range described herein) IC₅₀ (for target mammalian cell killing) as compared to the IC₅₀ for a composition including the same amount of a control ABPC (e.g., any of the control ABPCs described herein) (e.g., upon contacting the same target mammalian cells).

[0567] In some examples of any of the ABPCs described herein, a composition including any of the ABPCs described herein (e.g., upon contacting target mammalian cells presenting CD22 on their surface) can provide for an increase (e.g., at least a 0.1-fold increase, at least a 0.2-fold increase, at least a 0.4-fold increase, at least a 0.6-fold increase, at least a 0.8-fold increase, at least a 1-fold increase, at least a 2-fold increase, at least a 5-fold increase, at least a 10-fold increase, at least a 15-fold increase, at least a 20-fold increase, at least a 25-fold increase, at least a 30-fold increase, at least a 35-fold increase, at least a 40-fold increase, at least a 45-fold increase, at least a 50-fold increase, at least a 55-fold increase, at least a 60-fold increase, at least a 65-fold increase, at least a 70-fold increase, at least a 75-fold increase, at least a 80-fold increase, at least a 85-fold increase, at least a 90-fold increase, at least a 95-fold increase, or at least a 100-fold increase, or about a 0.1-fold increase to about 500-fold increase (or any of the subranges of this range described herein) in the ratio of K_{D} on target mammalian cells presenting CD22 on their surface at a neutral pH (a pH of about 7.0 to about 8.0) to IC₅₀ at the neutral pH on the same target cells, e.g., as compared to a control ABPC (e.g., any of the exemplary control ABPCs described herein).

[0568] In some examples of any of the ABPCs described herein, a composition including the ABPC (e.g., any of the ABPCs described herein) can provide for an increase (e.g., a detectable increase) (e.g., at least a 1% increase, at least a 2% increase, at least a 5% increase, at least a 10% increase, at least a 15% increase, at least a 20% increase, at least a 25% increase, at least a 30% increase, at least a 35% increase, at least a 40% increase, at least a 45% increase, at least a 50% increase, at least a 55% increase, at least a 60% increase, at least a 65% increase, at least a 70% increase, at least a 75% increase, at least a 80% increase, at least a 85% increase, at least a 90% increase, at least a 95% increase, at least a 100% increase, at least a 120% increase, at least a 140% increase, at least a 160% increase, at least a 180% increase, at least a 200% increase, at least a 250% increase, at least a 300% increase, at least a 350% increase, at least a 400% increase, at least a 450% increase, at least a 500% increase, at least a 1,000% increase, at least a 2,000% increase, at least a 3,000% increase, at least a 4,000% increase, at least a 5,000% increase, at least a 6,000% increase, at least a 7,000% increase, at least a 8,000% increase, at least a 9,000% increase, or at least a 10,000% increase, or about a 1% increase to about a 10,000% increase (e.g., or any of the subranges of this range described herein)) in endolysosomal delivery in the target mammalian cell (e.g., any of the exemplary target mammalian cells described herein) as compared to a composition including the same amount of a control ABPC (e.g., any of the exemplary control ABPCs described herein).

[0569] In some examples of any of the ABPCs described herein, a composition including the ABPC (e.g., any of the ABPCs described herein) can provide for an increase (e.g., a detectable increase) (e.g., at least a 0.1-fold increase, at least a 0.2-fold increase, at least a 0.3-fold increase, at least a 0.4-fold increase, at least a 0.5-fold increase, at least a 0.6-fold increase, at least a 0.7-fold increase, at least a 0.8-fold increase, at least a 0.9-fold increase, at least a 1.0-fold increase, at least a 1.2-fold increase, at least a 1.4-fold increase, at least a 1.5-fold increase, at least a 1.6-fold increase, at least a 1.8-fold increase, at least a 2.0-fold increase, at least a 2.2-fold increase, at least a 2.4-fold increase, at least a 2.5-fold increase, at least a 2.6-fold increase, at least a 2.8-fold increase, at least a 3.0-fold increase, at least a 3.5-fold increase, at least a 4.0-fold increase, at least a 4.5-fold increase, at least a 5.0-fold increase, at least a 5.5-fold increase, at least a 6.0-fold increase, at least a 6.5-fold increase, at least a 7.0-fold increase, at least a 7.5-fold increase, at least a 8.0-fold increase, at least a 8.5-fold increase, at least a 9.0-fold increase, at least a 9.5-fold increase, at least a 10-fold increase, at least a 15-fold increase, at least a 20-fold increase, at least a 25-fold increase, at least a 30-fold increase, at least a 35-fold increase, at least a 40-fold increase, at least a 45-fold increase, at least a 50-fold increase, at least a 55-fold increase, at least a 60-fold increase, at least a 65-fold increase, at least a 70-fold increase, at least a 75-fold increase, at least a 80-fold increase, at least a 85-fold increase, at least a 90-fold increase, at least a 95-fold increase, or at least a 100-fold increase, or about a 0.1-fold increase to about a 100-fold increase (or any of the subranges of this range described herein)) in endolysosomal delivery in the target mammalian cell (e.g., any of the exemplary target mammalian cells described herein) as compared to a composition including the same amount of a control ABPC (e.g., any of the exemplary control ABPCs described herein).

[0570] In examples of any of the ABPCs described herein, the target mammalian cell does not express an FcRn receptor, or expresses a lower (e.g., a detectably lower) level (e.g., at least a 1% decreased, at least a 2% decreased, at least a 5% decreased, at least a 10% decrease, at least a 15% decreased, at least a 20% decreased, at least a 25% decreased, at least a 30% decreased, at least a 35% decreased, at least a 40% decreased, at least a 45% decreased, at least a 50% decreased, at least a 55% decreased, at least a 60% decreased, at least a 65% decreased, at least a 70% decreased, at least a 75% decreased, at least a 80% decreased, at least a 85% decreased, at least a 90% decreased, at least a 95% decreased, or at least a 99% decreased level) of FcRn receptor as compared to a FcRn expressing control cell (e.g., HUVEC—ThermoFisher #C0035C). In some examples of any of the ABPCs described herein, the target mammalian cell is a cancer cell. In some examples of any of the ABPCs described herein, the ABPC is cytotoxic or cytostatic to the target mammalian cell.

[0571] In some examples of any of the ABPCs described herein, a composition including any of the ABPCs described herein (e.g., upon administration to a subject) results in less (e.g., a 1% decrease to about a 99% decrease, or any of the subranges of this range described herein) of a reduction in the level of CD22 presented on the surface of the target cell as compared to a composition including the same amount of a control ABPC (e.g., any of the control ABPCs described herein). In some examples of any of the ABPCs described herein, the composition does not result in a detectable reduction in the level of the CD22 presented on the surface of the target mammalian cell.

[0572] In some examples of any of the ABPCs described herein, the ABPC is cross-reactive with a non-human primate CD22 and a human CD22. In some examples of any of the ABPCs described herein, the ABPC is cross-reactive with a non-human primate CD22, a human CD22, and one or both of rat CD22 and a mouse CD22. In some examples of any of the ABPCs described herein, the ABPC is cross-reactive with a non-human primate CD22, a human CD22, a rat CD22, and a mouse CD22. In some examples of any of the ABPCs described herein, the ABPC is cross-reactive with mouse CD22 and rat CD22. In some examples of any of the ABPCs described herein, the antigen-binding domain binds to an epitope of CD22 that is present on the surface of cells from an Old World Monkey.

[0573] Some examples of any of the ABPCs described herein can further include a second antigen-binding domain (e.g., any of the exemplary antigen-binding domains described herein).

[0574] Non-limiting aspects of these methods are described below, and can be used in any combination without limitation. Additional aspects of these methods are known in the art.

### CD22 or Epitope of CD22

[0575] Sialic Acid-Binding Ig-Like Lectin 2 (CD22) is a tumor antigen that is known in the art, and is the target of therapeutic antibodies in oncology (Li et al (2013) “DCDT2980S, an anti-CD22-monomethyl auristatin E antibody-drug conjugate, is a potential treatment for non-Hodgkin lymphoma.” Mol Cancer Ther. 12(7):1255-1265). The sequence of the mature Human CD22 can be found in SEQ ID NO: 9. The sequence of the cDNA encoding the mature Human CD22 can be found in SEQ ID NO: 10. The sequence of the extracellular domain of CD22 can be found in SEQ ID NO: 11. The sequence of the cDNA encoding the extracellular domain of CD22 can be found in SEQ ID NO: 12.

### Antigen-Binding Protein Constructs

[0576] Any of the antigen-binding protein constructs (ABPCs) described herein can be a single polypeptide, or can include two, three, four, five, six, seven, eight, nine, or ten (the same or different) polypeptides. In some embodiments where the ABPC is a single polypeptide, the ABPC can include a single antigen-binding domain or two antigen-binding domains. In some embodiments where the ABPC is a single polypeptide and includes two antigen-binding domains, the first and second antigen-binding domains can be identical or different from each other (and can specifically bind to the same or different antigens or epitopes).

[0577] In some embodiments where the ABPC is a single polypeptide, the first antigen-binding domain and the second antigen-binding domain (if present) can each be independently selected from the group of: a VH domain, a VHH domain, a VNAR domain, and a scFv. In some embodiments where the ABPC is a single polypeptide, the antigen-binding protein construct can be a BiTe, a (scFv)2, a nanobody, a nanobody-HSA, a DART, a TandAb, a scDiabody, a scDiabody-CH3, scFv-CH-CL-scFv, a HSAbody, scDiabody-HAS, a tandem-scFv, an Adnectin, a DARPin, a fibronectin, and a DEP conjugate. Additional examples of antigen-binding domains that can be used when the ABPC is a single polypeptide are known in the art.

[0578] A V_{H}H domain is a single monomeric variable antibody domain that can be found in camelids. A V_{NAR} domain is a single monomeric variable antibody domain that can be found in cartilaginous fish. Non-limiting aspects of V_{H}H domains and V_{NAR} domains are described in, e.g., Cromie et al., Curr. Top. Med. Chem. 15:2543-2557, 2016; De Genst et al., Dev. Comp. Immunol. 30:187-198, 2006; De Meyer et al., Trends Biotechnol. 32:263-270, 2014; Kijanka et al., Nanomedicine 10:161-174, 2015; Kovaleva et al., Expert. Opin. Biol. Ther. 14:1527-1539, 2014; Krah et al., Immunopharmacol. Immunotoxicol. 38:21-28, 2016; Mujic-Delic et al., Trends Pharmacol. Sci. 35:247-255, 2014; Muyldermans, J. Biotechnol. 74:277-302, 2001; Muyldermans et al., Trends Biochem. Sci. 26:230-235, 2001; Muyldermans, Ann. Rev. Biochem. 82:775-797, 2013; Rahbarizadeh et al., Immunol. Invest. 40:299-338, 2011; Van Audenhove et al., EBioMedicine 8:40-48, 2016; Van Bockstaele et al., Curr. Opin. Investig. Drugs 10:1212-1224, 2009; Vincke et al., Methods Mol. Biol. 911:15-26, 2012; and Wesolowski et al., Med. Microbiol. Immunol. 198:157-174, 2009.

[0579] In some embodiments where the ABPC is a single polypeptide and includes two antigen-binding domains, the first antigen-binding domain and the second antigen-binding domain can both be VHH domains, or at least one antigen-binding domain can be a VHH domain. In some embodiments where the ABPC is a single polypeptide and includes two antigen-binding domains, the first antigen-binding domain and the second antigen-binding domain are both V_{NAR} domains, or at least one antigen-binding domain is a V_{NAR} domain. In some embodiments where the ABPC is a single polypeptide, the first antigen-binding domain is a scFv domain. In some embodiments where the ABPC is a single polypeptide and includes two antigen-binding domains, the first antigen-binding domain and the second antigen-binding domain can both be scFv domains, or at least one antigen-binding domain can be a scFv domain.

[0580] In some embodiments, the ABPC can include two or more polypeptides (e.g., two, three, four, five, six, seven, eight, nine, or ten polypeptides). In some embodiments where the ABPC includes two or more polypeptides, two, three, four, five or six of the polypeptides of the two or more polypeptides can be identical.

[0581] In some embodiments where the ABPC includes two or more polypeptides (e.g., two, three, four, five, six, seven, eight, nine, or ten polypeptides), two or more of the polypeptides of the ABPC can assemble (e.g., non-covalently assemble) to form one or more antigen-binding domains, e.g., an antigen-binding fragment of an antibody (e.g., any of the antigen-binding fragments of an antibody described herein), a VHH-scAb, a VHH-Fab, a Dual scFab, a F(ab′)2, a diabody, a crossMab, a DAF (two-in-one), a DAF (four-in-one), a DutaMab, a DT-IgG, a knobs-in-holes common light chain, a knobs-in-holes assembly, a charge pair, a Fab-arm exchange, a SEEDbody, a LUZ-Y, a Fcab, a κλ-body, an orthogonal Fab, a DVD-IgG, a IgG(H)-scFv, a scFv-(H)IgG, IgG(L)-scFv, scFv-(L)IgG, IgG(L,H)-Fv, IgG(H)-V, V(H)-IgG, IgG(L)-V, V(L)-IgG, KIH IgG-scFab, 2scFv-IgG, IgG-2scFv, scFv4-Ig, Zybody, DVI-IgG, Diabody-CH3, a triple body, a miniantibody, a minibody, a TriBi minibody, scFv-CH3 KIH, Fab-scFv, a F(ab′)2-scFv2, a scFv-KIH, a Fab-scFv-Fc, a tetravalent HCAb, a scDiabody-Fc, a Diabody-Fc, a tandem scFv-Fc, a VHH-Fc, a tandem VHH-Fc, a VHH-Fc KiH, a Fab-VHH-Fc, an Intrabody, a dock and lock, an ImmTAC, an IgG-IgG conjugate, a Cov-X-Body, a scFv1-PEG-scFv2, an Adnectin, a DARPin, a fibronectin, and a DEP conjugate. See, e.g., Spiess et al., Mol. Immunol. 67:95-106, 2015, incorporated in its entirety herewith, for a description of these elements. Non-limiting examples of an antigen-binding fragment of an antibody include an Fv fragment, a Fab fragment, a F(ab′)₂ fragment, and a Fab′ fragment. Additional examples of an antigen-binding fragment of an antibody is an antigen-binding fragment of an IgG (e.g., an antigen-binding fragment of IgG1, IgG2, IgG3, or IgG4) (e.g., an antigen-binding fragment of a human or humanized IgG, e.g., human or humanized IgG1, IgG2, IgG3, or IgG4); an antigen-binding fragment of an IgA (e.g., an antigen-binding fragment of IgA1 or IgA2) (e.g., an antigen-binding fragment of a human or humanized IgA, e.g., a human or humanized IgA1 or IgA2); an antigen-binding fragment of an IgD (e.g., an antigen-binding fragment of a human or humanized IgD); an antigen-binding fragment of an IgE (e.g., an antigen-binding fragment of a human or humanized IgE); or an antigen-binding fragment of an IgM (e.g., an antigen-binding fragment of a human or humanized IgM).

[0582] A “Fv” fragment includes a non-covalently-linked dimer of one heavy chain variable domain and one light chain variable domain.

[0583] A “Fab” fragment includes, the constant domain of the light chain and the first constant domain (C_{H1}) of the heavy chain, in addition to the heavy and light chain variable domains of the Fv fragment.

[0584] A “F(ab′)₂” fragment includes two Fab fragments joined, near the hinge region, by disulfide bonds.

[0585] A “dual variable domain immunoglobulin” or “DVD-Ig” refers to multivalent and multispecific binding proteins as described, e.g., in DiGiammarino et al., Methods Mol. Biol. 899:145-156, 2012; Jakob et al., MABs 5:358-363, 2013; and U.S. Pat. Nos. 7,612,181; 8,258,268; 8,586,714; 8,716,450; 8,722,855; 8,735,546; and 8,822,645, each of which is incorporated by reference in its entirety.

[0586] DARTs are described in, e.g., Garber, Nature Reviews Drug Discovery 13:799-801, 2014.

[0587] Additional aspects of ABPCs are known in the art.

### Antigen-Binding Domains

[0588] In some embodiments of any of the antigen-binding protein constructs (ABPCs) described herein, the dissociation rate of the first antigen-binding domain (and optionally the second antigen-binding domain, if present) at a pH of about 4.0 to about 6.5 (e.g., about 4.0 to about 6.4, about 4.0 to about 6.3, about 4.0 to about 6.2, about 4.0 to about 6.1, about 4.0 to about 6.0, about 4.0 to about 5.9, about 4.0 to about 5.8, about 4.0 to about 5.7, about 4.0 to about 5.6, about 4.0 to about 5.5, about 4.0 to about 5.4, about 4.0 to about 5.3, about 4.0 to about 5.2, about 4.0 to about 5.1, about 4.0 to about 5.0, about 4.0 to about 4.9, about 4.0 to about 4.8, about 4.0 to about 4.7, about 4.0 to about 4.6, about 4.0 to about 4.5, about 4.0 to about 4.4, about 4.0 to about 4.3, about 4.0 to about 4.2, about 4.0 to about 4.1, about 4.1 to about 6.5, about 4.1 to about 6.4, about 4.1 to about 6.3, about 4.1 to about 6.2, about 4.1 to about 6.1, about 4.1 to about 6.0, about 4.1 to about 5.9, about 4.1 to about 5.8, about 4.1 to about 5.7, about 4.1 to about 5.6, about 4.1 to about 5.5, about 4.1 to about 5.4, about 4.1 to about 5.3, about 4.1 to about 5.2, about 4.1 to about 5.1, about 4.1 to about 5.0, about 4.1 to about 4.9, about 4.1 to about 4.8, about 4.1 to about 4.7, about 4.1 to about 4.6, about 4.1 to about 4.5, about 4.1 to about 4.4, about 4.1 to about 4.3, about 4.1 to about 4.2, about 4.2 to about 6.5, about 4.2 to about 6.4, about 4.2 to about 6.3, about 4.2 to about 6.2, about 4.2 to about 6.1, about 4.2 to about 6.0, about 4.2 to about 5.9, about 4.2 to about 5.8, about 4.2 to about 5.7, about 4.2 to about 5.6, about 4.2 to about 5.5, about 4.2 to about 5.4, about 4.2 to about 5.3, about 4.2 to about 5.2, about 4.2 to about 5.1, about 4.2 to about 5.0, about 4.2 to about 4.9, about 4.2 to about 4.8, about 4.2 to about 4.7, about 4.2 to about 4.6, about 4.2 to about 4.5, about 4.2 to about 4.4, about 4.2 to about 4.3, about 4.3 to about 6.5, about 4.3 to about 6.4, about 4.3 to about 6.3, about 4.3 to about 6.2, about 4.3 to about 6.1, about 4.3 to about 6.0, about 4.3 to about 5.9, about 4.3 to about 5.8, about 4.3 to about 5.7, about 4.3 to about 5.6, about 4.3 to about 5.5, about 4.3 to about 5.4, about 4.3 to about 5.3, about 4.3 to about 5.2, about 4.3 to about 5.1, about 4.3 to about 5.0, about 4.3 to about 4.9, about 4.3 to about 4.8, about 4.3 to about 4.7, about 4.3 to about 4.6, about 4.3 to about 4.5, about 4.3 to about 4.4, about 4.4 to about 6.5, about 4.4 to about 6.4, about 4.4 to about 6.3, about 4.4 to about 6.2, about 4.4 to about 6.1, about 4.4 to about 6.0, about 4.4 to about 5.9, about 4.4 to about 5.8, about 4.4 to about 5.7, about 4.4 to about 5.6, about 4.4 to about 5.5, about 4.4 to about 5.4, about 4.4 to about 5.3, about 4.4 to about 5.2, about 4.4 to about 5.1, about 4.4 to about 5.0, about 4.4 to about 4.9, about 4.4 to about 4.8, about 4.4 to about 4.7, about 4.4 to about 4.6, about 4.4 to about 4.5, about 4.5 to about 6.5, about 4.5 to about 6.4, about 4.5 to about 6.3, about 4.5 to about 6.2, about 4.5 to about 6.1, about 4.5 to about 6.0, about 4.5 to about 5.9, about 4.5 to about 5.8, about 4.5 to about 5.7, about 4.5 to about 5.6, about 4.5 to about 5.5, about 4.5 to about 5.4, about 4.5 to about 5.3, about 4.5 to about 5.2, about 4.5 to about 5.1, about 4.5 to about 5.0, about 4.5 to about 4.9, about 4.5 to about 4.8, about 4.5 to about 4.7, about 4.5 to about 4.6, about 4.6 to about 6.5, about 4.6 to about 6.4, about 4.6 to about 6.3, about 4.6 to about 6.2, about 4.6 to about 6.1, about 4.6 to about 6.0, about 4.6 to about 5.9, about 4.6 to about 5.8, about 4.6 to about 5.7, about 4.6 to about 5.6, about 4.6 to about 5.5, about 4.6 to about 5.4, about 4.6 to about 5.3, about 4.6 to about 5.2, about 4.6 to about 5.1, about 4.6 to about 5.0, about 4.6 to about 4.9, about 4.6 to about 4.8, about 4.6 to about 4.7, about 4.7 to about 6.5, about 4.7 to about 6.4, about 4.7 to about 6.3, about 4.7 to about 6.2, about 4.7 to about 6.1, about 4.7 to about 6.0, about 4.7 to about 5.9, about 4.7 to about 5.8, about 4.7 to about 5.7, about 4.7 to about 5.6, about 4.7 to about 5.5, about 4.7 to about 5.4, about 4.7 to about 5.3, about 4.7 to about 5.2, about 4.7 to about 5.1, about 4.7 to about 5.0, about 4.7 to about 4.9, about 4.7 to about 4.8, about 4.8 to about 6.5, about 4.8 to about 6.4, about 4.8 to about 6.3, about 4.8 to about 6.2, about 4.8 to about 6.1, about 4.8 to about 6.0, about 4.8 to about 5.9, about 4.8 to about 5.8, about 4.8 to about 5.7, about 4.8 to about 5.6, about 4.8 to about 5.5, about 4.8 to about 5.4, about 4.8 to about 5.3, about 4.8 to about 5.2, about 4.8 to about 5.1, about 4.8 to about 5.0, about 4.8 to about 4.9, about 4.9 to about 6.5, about 4.9 to about 6.4, about 4.9 to about 6.3, about 4.9 to about 6.2, about 4.9 to about 6.1, about 4.9 to about 6.0, about 4.9 to about 5.9, about 4.9 to about 5.8, about 4.9 to about 5.7, about 4.9 to about 5.6, about 4.9 to about 5.5, about 4.9 to about 5.4, about 4.9 to about 5.3, about 4.9 to about 5.2, about 4.9 to about 5.1, about 4.9 to about 5.0, about 5.0 to about 6.5, about 5.0 to about 6.4, about 5.0 to about 6.3, about 5.0 to about 6.2, about 5.0 to about 6.1, about 5.0 to about 6.0, about 5.0 to about 5.9, about 5.0 to about 5.8, about 5.0 to about 5.7, about 5.0 to about 5.6, about 5.0 to about 5.5, about 5.0 to about 5.4, about 5.0 to about 5.3, about 5.0 to about 5.2, about 5.0 to about 5.1, about 5.1 to about 6.5, about 5.1 to about 6.4, about 5.1 to about 6.3, about 5.1 to about 6.2, about 5.1 to about 6.1, about 5.1 to about 6.0, about 5.1 to about 5.9, about 5.1 to about 5.8, about 5.1 to about 5.7, about 5.1 to about 5.6, about 5.1 to about 5.5, about 5.1 to about 5.4, about 5.1 to about 5.3, about 5.1 to about 5.2, about 5.2 to about 6.5, about 5.2 to about 6.4, about 5.2 to about 6.3, about 5.2 to about 6.2, about 5.2 to about 6.1, about 5.2 to about 6.0, about 5.2 to about 5.9, about 5.2 to about 5.8, about 5.2 to about 5.7, about 5.2 to about 5.6, about 5.2 to about 5.5, about 5.2 to about 5.4, about 5.2 to about 5.3, about 5.3 to about 6.5, about 5.3 to about 6.4, about 5.3 to about 6.3, about 5.3 to about 6.2, about 5.3 to about 6.1, about 5.3 to about 6.0, about 5.3 to about 5.9, about 5.3 to about 5.8, about 5.3 to about 5.7, about 5.3 to about 5.6, about 5.3 to about 5.5, about 5.3 to about 5.4, about 5.4 to about 6.5, about 5.4 to about 6.4, about 5.4 to about 6.3, about 5.4 to about 6.2, about 5.4 to about 6.1, about 5.4 to about 6.0, about 5.4 to about 5.9, about 5.4 to about 5.8, about 5.4 to about 5.7, about 5.4 to about 5.6, about 5.4 to about 5.5, about 5.5 to about 6.5, about 5.5 to about 6.4, about 5.5 to about 6.3, about 5.5 to about 6.2, about 5.5 to about 6.1, about 5.5 to about 6.0, about 5.5 to about 5.9, about 5.5 to about 5.8, about 5.5 to about 5.7, about 5.5 to about 5.6, about 5.6 to about 6.5, about 5.6 to about 6.4, about 5.6 to about 6.3, about 5.6 to about 6.2, about 5.6 to about 6.1, about 5.6 to about 6.0, about 5.6 to about 5.9, about 5.6 to about 5.8, about 5.6 to about 5.7, about 5.7 to about 6.5, about 5.7 to about 6.4, about 5.7 to about 6.3, about 5.7 to about 6.2, about 5.7 to about 6.1, about 5.7 to about 6.0, about 5.7 to about 5.9, about 5.7 to about 5.8, about 5.8 to about 6.5, about 5.8 to about 6.4, about 5.8 to about 6.3, about 5.8 to about 6.2, about 5.8 to about 6.1, about 5.8 to about 6.0, about 5.8 to about 5.9, about 5.9 to about 6.5, about 5.9 to about 6.4, about 5.9 to about 6.3, about 5.9 to about 6.2, about 5.9 to about 6.1, about 5.9 to about 6.0, about 6.0 to about 6.5, about 6.0 to about 6.4, about 6.0 to about 6.3, about 6.0 to about 6.2, about 6.0 to about 6.1, about 6.1 to about 6.5, about 6.1 to about 6.4, about 6.1 to about 6.3, about 6.1 to about 6.2, about 6.2 to about 6.5, about 6.2 to about 6.4, about 6.2 to about 6.3, about 6.3 to about 6.5, about 6.3 to about 6.4, or about 6.4 to about 6.5) is faster (e.g., (e.g., at least 5% faster, at least 10% faster, at least 15% faster, at least 20%, at least 25% faster, at least 30% faster, at least 35% faster, at least 40% faster, at least 45% faster, at least 50% faster, at least 55% faster, at least 60% faster, at least 65% faster, at least 70% faster, at least 75% faster, at least 80% faster, at least 85% faster, at least 90% faster, at least 95% faster, at least 100% faster, at least 120% faster, at least 140% faster, at least 160% faster, at least 180% faster, at least 200% faster, at least 220% faster at least 240% faster at least 260% faster at least 280% faster at least 300% faster at least 320% faster at least 340% faster at least 360% faster at least 380% faster at least 400% faster at least 420% faster at least 440% faster at least 460% faster at least 480% faster, at least 500% faster, at least 1,000% faster, at least 2,000% faster, at least 3,000% faster, at least 4,000% faster, at least 5,000%, at least 6,000% faster, at least 7,000% faster, at least 8,000% faster, at least 9,000% faster, or at least 10,000% faster, or about 5% faster to about 10,000% faster, about 5% faster to about 9,000% faster, about 5% faster to about 8,000% faster, about 5% faster to about 7,000% faster, about 5% faster to about 6,000% faster, about 5% faster to about 5,000% faster, about 5% faster to about 4,000% faster, about 5% faster to about 3,000% faster, about 5% faster to about 2,000% faster, about 5% faster to about 1,000% faster, about 5% faster to about 500% faster, about 5% faster to about 480% faster, about 5% faster to about 460% faster, about 5% faster to about 440% faster, about 5% faster to about 420% faster, about 5% faster to about 400% faster, about 5% faster to about 380% faster, about 5% faster to about 360% faster, about 5% faster to about 340% faster, about 5% faster to about 320% faster, about 5% faster to about 300% faster, about 5% faster to about 280% faster, about 5% faster to about 260% faster, about 5% faster to about 240% faster, about 5% faster to about 220% faster, about 5% faster to about 200% faster, about 5% faster to about 180% faster, about 5% faster to about 160% faster, about 5% faster to about 140% faster, about 5% faster to about 120% faster, about 5% faster to about 100% faster, about 5% faster to about 95% faster, about 5% faster to about 90% faster, about 5% faster to about 85% faster, about 5% faster to about 80% faster, about 5% faster to about 75% faster, about 5% faster to about 70% faster, about 5% faster to about 65% faster, about 5% faster to about 60% faster, about 5% faster to about 55% faster, about 5% faster to about 50% faster, about 5% faster to about 45% faster, about 5% faster to about 40% faster, about 5% faster to about 35% faster, about 5% faster to about 30% faster, about 5% faster to about 25% faster, about 5% faster to about 20% faster, about 5% faster to about 15% faster, about 5% faster to about 10% faster, about 10% faster to about 10,000% faster, about 10% faster to about 9,000% faster, about 10% faster to about 8,000% faster, about 10% faster to about 7,000% faster, about 10% faster to about 6,000% faster, about 10% faster to about 5,000% faster, about 10% faster to about 4,000% faster, about 10% faster to about 3,000% faster, about 10% faster to about 2,000% faster, about 10% faster to about 1,000% faster, about 10% faster to about 500% faster, about 10% faster to about 480% faster, about 10% faster to about 460% faster, about 10% faster to about 440% faster, about 10% faster to about 420% faster, about 10% faster to about 400% faster, about 10% faster to about 380% faster, about 10% faster to about 360% faster, about 10% faster to about 340% faster, about 10% faster to about 320% faster, about 10% faster to about 300% faster, about 10% faster to about 280% faster, about 10% faster to about 260% faster, about 10% faster to about 240% faster, about 10% faster to about 220% faster, about 10% faster to about 200% faster, about 10% faster to about 180% faster, about 10% faster to about 160% faster, about 10% faster to about 140% faster, about 10% faster to about 120% faster, about 10% faster to about 100% faster, about 10% faster to about 95% faster, about 10% faster to about 90% faster, about 10% faster to about 85% faster, about 10% faster to about 80% faster, about 10% faster to about 75% faster, about 10% faster to about 70% faster, about 10% faster to about 65% faster, about 10% faster to about 60% faster, about 10% faster to about 55% faster, about 10% faster to about 50% faster, about 10% faster to about 45% faster, about 10% faster to about 40% faster, about 10% faster to about 35% faster, about 10% faster to about 30% faster, about 10% faster to about 25% faster, about 10% faster to about 20% faster, about 10% faster to about 15% faster, about 15% faster to about 10,000% faster, about 15% faster to about 9,000% faster, about 15% faster to about 8,000% faster, about 15% faster to about 7,000% faster, about 15% faster to about 6,000% faster, about 15% faster to about 5,000% faster, about 15% faster to about 4,000% faster, about 15% faster to about 3,000% faster, about 15% faster to about 2,000% faster, about 15% faster to about 1,000% faster, about 15% faster to about 500% faster, about 15% faster to about 480% faster, about 15% faster to about 460% faster, about 15% faster to about 440% faster, about 15% faster to about 420% faster, about 15% faster to about 400% faster, about 15% faster to about 380% faster, about 15% faster to about 360% faster, about 15% faster to about 340% faster, about 15% faster to about 320% faster, about 15% faster to about 300% faster, about 15% faster to about 280% faster, about 15% faster to about 260% faster, about 15% faster to about 240% faster, about 15% faster to about 220% faster, about 15% faster to about 200% faster, about 15% faster to about 180% faster, about 15% faster to about 160% faster, about 15% faster to about 140% faster, about 15% faster to about 120% faster, about 15% faster to about 100% faster, about 15% faster to about 95% faster, about 15% faster to about 90% faster, about 15% faster to about 85% faster, about 15% faster to about 80% faster, about 15% faster to about 75% faster, about 15% faster to about 70% faster, about 15% faster to about 65% faster, about 15% faster to about 60% faster, about 15% faster to about 55% faster, about 15% faster to about 50% faster, about 15% faster to about 45% faster, about 15% faster to about 40% faster, about 15% faster to about 35% faster, about 15% faster to about 30% faster, about 15% faster to about 25% faster, about 15% faster to about 20% faster, about 20% faster to about 10,000% faster, about 20% faster to about 9,000% faster, about 20% faster to about 8,000% faster, about 20% faster to about 7,000% faster, about 20% faster to about 6,000% faster, about 20% faster to about 5,000% faster, about 20% faster to about 4,000% faster, about 20% faster to about 3,000% faster, about 20% faster to about 2,000% faster, about 20% faster to about 1,000% faster, about 20% faster to about 500% faster, about 20% faster to about 480% faster, about 20% faster to about 460% faster, about 20% faster to about 440% faster, about 20% faster to about 420% faster, about 20% faster to about 400% faster, about 20% faster to about 380% faster, about 20% faster to about 360% faster, about 20% faster to about 340% faster, about 20% faster to about 320% faster, about 20% faster to about 300% faster, about 20% faster to about 280% faster, about 20% faster to about 260% faster, about 20% faster to about 240% faster, about 20% faster to about 220% faster, about 20% faster to about 200% faster, about 20% faster to about 180% faster, about 20% faster to about 160% faster, about 20% faster to about 140% faster, about 20% faster to about 120% faster, about 20% faster to about 100% faster, about 20% faster to about 95% faster, about 20% faster to about 90% faster, about 20% faster to about 85% faster, about 20% faster to about 80% faster, about 20% faster to about 75% faster, about 20% faster to about 70% faster, about 20% faster to about 65% faster, about 20% faster to about 60% faster, about 20% faster to about 55% faster, about 20% faster to about 50% faster, about 20% faster to about 45% faster, about 20% faster to about 40% faster, about 20% faster to about 35% faster, about 20% faster to about 30% faster, about 20% faster to about 25% faster, about 25% faster to about 10,000% faster, about 25% faster to about 9,000% faster, about 25% faster to about 8,000% faster, about 25% faster to about 7,000% faster, about 25% faster to about 6,000% faster, about 25% faster to about 5,000% faster, about 25% faster to about 4,000% faster, about 25% faster to about 3,000% faster, about 25% faster to about 2,000% faster, about 25% faster to about 1,000% faster, about 25% faster to about 500% faster, about 25% faster to about 480% faster, about 25% faster to about 460% faster, about 25% faster to about 440% faster, about 25% faster to about 420% faster, about 25% faster to about 400% faster, about 25% faster to about 380% faster, about 25% faster to about 360% faster, about 25% faster to about 340% faster, about 25% faster to about 320% faster, about 25% faster to about 300% faster, about 25% faster to about 280% faster, about 25% faster to about 260% faster, about 25% faster to about 240% faster, about 25% faster to about 220% faster, about 25% faster to about 200% faster, about 25% faster to about 180% faster, about 25% faster to about 160% faster, about 25% faster to about 140% faster, about 25% faster to about 120% faster, about 25% faster to about 100% faster, about 25% faster to about 95% faster, about 25% faster to about 90% faster, about 25% faster to about 85% faster, about 25% faster to about 80% faster, about 25% faster to about 75% faster, about 25% faster to about 70% faster, about 25% faster to about 65% faster, about 25% faster to about 60% faster, about 25% faster to about 55% faster, about 25% faster to about 50% faster, about 25% faster to about 45% faster, about 25% faster to about 40% faster, about 25% faster to about 35% faster, about 25% faster to about 30% faster, about 30% faster to about 10,000% faster, about 30% faster to about 9,000% faster, about 30% faster to about 8,000% faster, about 30% faster to about 7,000% faster, about 30% faster to about 6,000% faster, about 30% faster to about 5,000% faster, about 30% faster to about 4,000% faster, about 30% faster to about 3,000% faster, about 30% faster to about 2,000% faster, about 30% faster to about 1,000% faster, about 30% faster to about 500% faster, about 30% faster to about 480% faster, about 30% faster to about 460% faster, about 30% faster to about 440% faster, about 30% faster to about 420% faster, about 30% faster to about 400% faster, about 30% faster to about 380% faster, about 30% faster to about 360% faster, about 30% faster to about 340% faster, about 30% faster to about 320% faster, about 30% faster to about 300% faster, about 30% faster to about 280% faster, about 30% faster to about 260% faster, about 30% faster to about 240% faster, about 30% faster to about 220% faster, about 30% faster to about 200% faster, about 30% faster to about 180% faster, about 30% faster to about 160% faster, about 30% faster to about 140% faster, about 30% faster to about 120% faster, about 30% faster to about 100% faster, about 30% faster to about 95% faster, about 30% faster to about 90% faster, about 30% faster to about 85% faster, about 30% faster to about 80% faster, about 30% faster to about 75% faster, about 30% faster to about 70% faster, about 30% faster to about 65% faster, about 30% faster to about 60% faster, about 30% faster to about 55% faster, about 30% faster to about 50% faster, about 30% faster to about 45% faster, about 30% faster to about 40% faster, about 30% faster to about 35% faster, about 35% faster to about 10,000% faster, about 35% faster to about 9,000% faster, about 35% faster to about 8,000% faster, about 35% faster to about 7,000% faster, about 35% faster to about 6,000% faster, about 35% faster to about 5,000% faster, about 35% faster to about 4,000% faster, about 35% faster to about 3,000% faster, about 35% faster to about 2,000% faster, about 35% faster to about 1,000% faster, about 35% faster to about 500% faster, about 35% faster to about 480% faster, about 35% faster to about 460% faster, about 35% faster to about 440% faster, about 35% faster to about 420% faster, about 35% faster to about 400% faster, about 35% faster to about 380% faster, about 35% faster to about 360% faster, about 35% faster to about 340% faster, about 35% faster to about 320% faster, about 35% faster to about 300% faster, about 35% faster to about 280% faster, about 35% faster to about 260% faster, about 35% faster to about 240% faster, about 35% faster to about 220% faster, about 35% faster to about 200% faster, about 35% faster to about 180% faster, about 35% faster to about 160% faster, about 35% faster to about 140% faster, about 35% faster to about 120% faster, about 35% faster to about 100% faster, about 35% faster to about 95% faster, about 35% faster to about 90% faster, about 35% faster to about 85% faster, about 35% faster to about 80% faster, about 35% faster to about 75% faster, about 35% faster to about 70% faster, about 35% faster to about 65% faster, about 35% faster to about 60% faster, about 35% faster to about 55% faster, about 35% faster to about 50% faster, about 35% faster to about 45% faster, about 35% faster to about 40% faster, about 40% faster to about 10,000% faster, about 40% faster to about 9,000% faster, about 40% faster to about 8,000% faster, about 40% faster to about 7,000% faster, about 40% faster to about 6,000% faster, about 40% faster to about 5,000% faster, about 40% faster to about 4,000% faster, about 40% faster to about 3,000% faster, about 40% faster to about 2,000% faster, about 40% faster to about 1,000% faster, about 40% faster to about 500% faster, about 40% faster to about 480% faster, about 40% faster to about 460% faster, about 40% faster to about 440% faster, about 40% faster to about 420% faster, about 40% faster to about 400% faster, about 40% faster to about 380% faster, about 40% faster to about 360% faster, about 40% faster to about 340% faster, about 40% faster to about 320% faster, about 40% faster to about 300% faster, about 40% faster to about 280% faster, about 40% faster to about 260% faster, about 40% faster to about 240% faster, about 40% faster to about 220% faster, about 40% faster to about 200% faster, about 40% faster to about 180% faster, about 40% faster to about 160% faster, about 40% faster to about 140% faster, about 40% faster to about 120% faster, about 40% faster to about 100% faster, about 40% faster to about 95% faster, about 40% faster to about 90% faster, about 40% faster to about 85% faster, about 40% faster to about 80% faster, about 40% faster to about 75% faster, about 40% faster to about 70% faster, about 40% faster to about 65% faster, about 40% faster to about 60% faster, about 40% faster to about 55% faster, about 40% faster to about 50% faster, about 40% faster to about 45% faster, about 45% faster to about 10,000% faster, about 45% faster to about 9,000% faster, about 45% faster to about 8,000% faster, about 45% faster to about 7,000% faster, about 45% faster to about 6,000% faster, about 45% faster to about 5,000% faster, about 45% faster to about 4,000% faster, about 45% faster to about 3,000% faster, about 45% faster to about 2,000% faster, about 45% faster to about 1,000% faster, about 45% faster to about 500% faster, about 45% faster to about 480% faster, about 45% faster to about 460% faster, about 45% faster to about 440% faster, about 45% faster to about 420% faster, about 45% faster to about 400% faster, about 45% faster to about 380% faster, about 45% faster to about 360% faster, about 45% faster to about 340% faster, about 45% faster to about 320% faster, about 45% faster to about 300% faster, about 45% faster to about 280% faster, about 45% faster to about 260% faster, about 45% faster to about 240% faster, about 45% faster to about 220% faster, about 45% faster to about 200% faster, about 45% faster to about 180% faster, about 45% faster to about 160% faster, about 45% faster to about 140% faster, about 45% faster to about 120% faster, about 45% faster to about 100% faster, about 45% faster to about 95% faster, about 45% faster to about 90% faster, about 45% faster to about 85% faster, about 45% faster to about 80% faster, about 45% faster to about 75% faster, about 45% faster to about 70% faster, about 45% faster to about 65% faster, about 45% faster to about 60% faster, about 45% faster to about 55% faster, about 45% faster to about 50% faster, about 50% faster to about 10,000% faster, about 50% faster to about 9,000% faster, about 50% faster to about 8,000% faster, about 50% faster to about 7,000% faster, about 50% faster to about 6,000% faster, about 50% faster to about 5,000% faster, about 50% faster to about 4,000% faster, about 50% faster to about 3,000% faster, about 50% faster to about 2,000% faster, about 50% faster to about 1,000% faster, about 50% faster to about 500% faster, about 50% faster to about 480% faster, about 50% faster to about 460% faster, about 50% faster to about 440% faster, about 50% faster to about 420% faster, about 50% faster to about 400% faster, about 50% faster to about 380% faster, about 50% faster to about 360% faster, about 50% faster to about 340% faster, about 50% faster to about 320% faster, about 50% faster to about 300% faster, about 50% faster to about 280% faster, about 50% faster to about 260% faster, about 50% faster to about 240% faster, about 50% faster to about 220% faster, about 50% faster to about 200% faster, about 50% faster to about 180% faster, about 50% faster to about 160% faster, about 50% faster to about 140% faster, about 50% faster to about 120% faster, about 50% faster to about 100% faster, about 50% faster to about 95% faster, about 50% faster to about 90% faster, about 50% faster to about 85% faster, about 50% faster to about 80% faster, about 50% faster to about 75% faster, about 50% faster to about 70% faster, about 50% faster to about 65% faster, about 50% faster to about 60% faster, about 50% faster to about 55% faster, about 55% faster to about 10,000% faster, about 55% faster to about 9,000% faster, about 55% faster to about 8,000% faster, about 55% faster to about 7,000% faster, about 55% faster to about 6,000% faster, about 55% faster to about 5,000% faster, about 55% faster to about 4,000% faster, about 55% faster to about 3,000% faster, about 55% faster to about 2,000% faster, about 55% faster to about 1,000% faster, about 55% faster to about 500% faster, about 55% faster to about 480% faster, about 55% faster to about 460% faster, about 55% faster to about 440% faster, about 55% faster to about 420% faster, about 55% faster to about 400% faster, about 55% faster to about 380% faster, about 55% faster to about 360% faster, about 55% faster to about 340% faster, about 55% faster to about 320% faster, about 55% faster to about 300% faster, about 55% faster to about 280% faster, about 55% faster to about 260% faster, about 55% faster to about 240% faster, about 55% faster to about 220% faster, about 55% faster to about 200% faster, about 55% faster to about 180% faster, about 55% faster to about 160% faster, about 55% faster to about 140% faster, about 55% faster to about 120% faster, about 55% faster to about 100% faster, about 55% faster to about 95% faster, about 55% faster to about 90% faster, about 55% faster to about 85% faster, about 55% faster to about 80% faster, about 55% faster to about 75% faster, about 55% faster to about 70% faster, about 55% faster to about 65% faster, about 55% faster to about 60% faster, about 60% faster to about 10,000% faster, about 60% faster to about 9,000% faster, about 60% faster to about 8,000% faster, about 60% faster to about 7,000% faster, about 60% faster to about 6,000% faster, about 60% faster to about 5,000% faster, about 60% faster to about 4,000% faster, about 60% faster to about 3,000% faster, about 60% faster to about 2,000% faster, about 60% faster to about 1,000% faster, about 60% faster to about 500% faster, about 60% faster to about 480% faster, about 60% faster to about 460% faster, about 60% faster to about 440% faster, about 60% faster to about 420% faster, about 60% faster to about 400% faster, about 60% faster to about 380% faster, about 60% faster to about 360% faster, about 60% faster to about 340% faster, about 60% faster to about 320% faster, about 60% faster to about 300% faster, about 60% faster to about 280% faster, about 60% faster to about 260% faster, about 60% faster to about 240% faster, about 60% faster to about 220% faster, about 60% faster to about 200% faster, about 60% faster to about 180% faster, about 60% faster to about 160% faster, about 60% faster to about 140% faster, about 60% faster to about 120% faster, about 60% faster to about 100% faster, about 60% faster to about 95% faster, about 60% faster to about 90% faster, about 60% faster to about 85% faster, about 60% faster to about 80% faster, about 60% faster to about 75% faster, about 60% faster to about 70% faster, about 60% faster to about 65% faster, about 65% faster to about 10,000% faster, about 65% faster to about 9,000% faster, about 65% faster to about 8,000% faster, about 65% faster to about 7,000% faster, about 65% faster to about 6,000% faster, about 65% faster to about 5,000% faster, about 65% faster to about 4,000% faster, about 65% faster to about 3,000% faster, about 65% faster to about 2,000% faster, about 65% faster to about 1,000% faster, about 65% faster to about 500% faster, about 65% faster to about 480% faster, about 65% faster to about 460% faster, about 65% faster to about 440% faster, about 65% faster to about 420% faster, about 65% faster to about 400% faster, about 65% faster to about 380% faster, about 65% faster to about 360% faster, about 65% faster to about 340% faster, about 65% faster to about 320% faster, about 65% faster to about 300% faster, about 65% faster to about 280% faster, about 65% faster to about 260% faster, about 65% faster to about 240% faster, about 65% faster to about 220% faster, about 65% faster to about 200% faster, about 65% faster to about 180% faster, about 65% faster to about 160% faster, about 65% faster to about 140% faster, about 65% faster to about 120% faster, about 65% faster to about 100% faster, about 65% faster to about 95% faster, about 65% faster to about 90% faster, about 65% faster to about 85% faster, about 65% faster to about 80% faster, about 65% faster to about 75% faster, about 65% faster to about 70% faster, about 70% faster to about 10,000% faster, about 70% faster to about 9,000% faster, about 70% faster to about 8,000% faster, about 70% faster to about 7,000% faster, about 70% faster to about 6,000% faster, about 70% faster to about 5,000% faster, about 70% faster to about 4,000% faster, about 70% faster to about 3,000% faster, about 70% faster to about 2,000% faster, about 70% faster to about 1,000% faster, about 70% faster to about 500% faster, about 70% faster to about 480% faster, about 70% faster to about 460% faster, about 70% faster to about 440% faster, about 70% faster to about 420% faster, about 70% faster to about 400% faster, about 70% faster to about 380% faster, about 70% faster to about 360% faster, about 70% faster to about 340% faster, about 70% faster to about 320% faster, about 70% faster to about 300% faster, about 70% faster to about 280% faster, about 70% faster to about 260% faster, about 70% faster to about 240% faster, about 70% faster to about 220% faster, about 70% faster to about 200% faster, about 70% faster to about 180% faster, about 70% faster to about 160% faster, about 70% faster to about 140% faster, about 70% faster to about 120% faster, about 70% faster to about 100% faster, about 70% faster to about 95% faster, about 70% faster to about 90% faster, about 70% faster to about 85% faster, about 70% faster to about 80% faster, about 70% faster to about 75% faster, about 75% faster to about 10,000% faster, about 75% faster to about 9,000% faster, about 75% faster to about 8,000% faster, about 75% faster to about 7,000% faster, about 75% faster to about 6,000% faster, about 75% faster to about 5,000% faster, about 75% faster to about 4,000% faster, about 75% faster to about 3,000% faster, about 75% faster to about 2,000% faster, about 75% faster to about 1,000% faster, about 75% faster to about 500% faster, about 75% faster to about 480% faster, about 75% faster to about 460% faster, about 75% faster to about 440% faster, about 75% faster to about 420% faster, about 75% faster to about 400% faster, about 75% faster to about 380% faster, about 75% faster to about 360% faster, about 75% faster to about 340% faster, about 75% faster to about 320% faster, about 75% faster to about 300% faster, about 75% faster to about 280% faster, about 75% faster to about 260% faster, about 75% faster to about 240% faster, about 75% faster to about 220% faster, about 75% faster to about 200% faster, about 75% faster to about 180% faster, about 75% faster to about 160% faster, about 75% faster to about 140% faster, about 75% faster to about 120% faster, about 75% faster to about 100% faster, about 75% faster to about 95% faster, about 75% faster to about 90% faster, about 75% faster to about 85% faster, about 75% faster to about 80% faster, about 80% faster to about 10,000% faster, about 80% faster to about 9,000% faster, about 80% faster to about 8,000% faster, about 80% faster to about 7,000% faster, about 80% faster to about 6,000% faster, about 80% faster to about 5,000% faster, about 80% faster to about 4,000% faster, about 80% faster to about 3,000% faster, about 80% faster to about 2,000% faster, about 80% faster to about 1,000% faster, about 80% faster to about 500% faster, about 80% faster to about 480% faster, about 80% faster to about 460% faster, about 80% faster to about 440% faster, about 80% faster to about 420% faster, about 80% faster to about 400% faster, about 80% faster to about 380% faster, about 80% faster to about 360% faster, about 80% faster to about 340% faster, about 80% faster to about 320% faster, about 80% faster to about 300% faster, about 80% faster to about 280% faster, about 80% faster to about 260% faster, about 80% faster to about 240% faster, about 80% faster to about 220% faster, about 80% faster to about 200% faster, about 80% faster to about 180% faster, about 80% faster to about 160% faster, about 80% faster to about 140% faster, about 80% faster to about 120% faster, about 80% faster to about 100% faster, about 80% faster to about 95% faster, about 80% faster to about 90% faster, about 80% faster to about 85% faster, about 85% faster to about 10,000% faster, about 85% faster to about 9,000% faster, about 85% faster to about 8,000% faster, about 85% faster to about 7,000% faster, about 85% faster to about 6,000% faster, about 85% faster to about 5,000% faster, about 85% faster to about 4,000% faster, about 85% faster to about 3,000% faster, about 85% faster to about 2,000% faster, about 85% faster to about 1,000% faster, about 85% faster to about 500% faster, about 85% faster to about 480% faster, about 85% faster to about 460% faster, about 85% faster to about 440% faster, about 85% faster to about 420% faster, about 85% faster to about 400% faster, about 85% faster to about 380% faster, about 85% faster to about 360% faster, about 85% faster to about 340% faster, about 85% faster to about 320% faster, about 85% faster to about 300% faster, about 85% faster to about 280% faster, about 85% faster to about 260% faster, about 85% faster to about 240% faster, about 85% faster to about 220% faster, about 85% faster to about 200% faster, about 85% faster to about 180% faster, about 85% faster to about 160% faster, about 85% faster to about 140% faster, about 85% faster to about 120% faster, about 85% faster to about 100% faster, about 85% faster to about 95% faster, about 85% faster to about 90% faster, about 90% faster to about 10,000% faster, about 90% faster to about 9,000% faster, about 90% faster to about 8,000% faster, about 90% faster to about 7,000% faster, about 90% faster to about 6,000% faster, about 90% faster to about 5,000% faster, about 90% faster to about 4,000% faster, about 90% faster to about 3,000% faster, about 90% faster to about 2,000% faster, about 90% faster to about 1,000% faster, about 90% faster to about 500% faster, about 90% faster to about 480% faster, about 90% faster to about 460% faster, about 90% faster to about 440% faster, about 90% faster to about 420% faster, about 90% faster to about 400% faster, about 90% faster to about 380% faster, about 90% faster to about 360% faster, about 90% faster to about 340% faster, about 90% faster to about 320% faster, about 90% faster to about 300% faster, about 90% faster to about 280% faster, about 90% faster to about 260% faster, about 90% faster to about 240% faster, about 90% faster to about 220% faster, about 90% faster to about 200% faster, about 90% faster to about 180% faster, about 90% faster to about 160% faster, about 90% faster to about 140% faster, about 90% faster to about 120% faster, about 90% faster to about 100% faster, about 90% faster to about 95% faster, about 95% faster to about 10,000% faster, about 95% faster to about 9,000% faster, about 95% faster to about 8,000% faster, about 95% faster to about 7,000% faster, about 95% faster to about 6,000% faster, about 95% faster to about 5,000% faster, about 95% faster to about 4,000% faster, about 95% faster to about 3,000% faster, about 95% faster to about 2,000% faster, about 95% faster to about 1,000% faster, about 95% faster to about 500% faster, about 95% faster to about 480% faster, about 95% faster to about 460% faster, about 95% faster to about 440% faster, about 95% faster to about 420% faster, about 95% faster to about 400% faster, about 95% faster to about 380% faster, about 95% faster to about 360% faster, about 95% faster to about 340% faster, about 95% faster to about 320% faster, about 95% faster to about 300% faster, about 95% faster to about 280% faster, about 95% faster to about 260% faster, about 95% faster to about 240% faster, about 95% faster to about 220% faster, about 95% faster to about 200% faster, about 95% faster to about 180% faster, about 95% faster to about 160% faster, about 95% faster to about 140% faster, about 95% faster to about 120% faster, about 95% faster to about 100% faster, about 100% faster to about 10,000% faster, about 100% faster to about 9,000% faster, about 100% faster to about 8,000% faster, about 100% faster to about 7,000% faster, about 100% faster to about 6,000% faster, about 100% faster to about 5,000% faster, about 100% faster to about 4,000% faster, about 100% faster to about 3,000% faster, about 100% faster to about 2,000% faster, about 100% faster to about 1,000% faster, about 100% faster to about 500% faster, about 100% faster to about 480% faster, about 100% faster to about 460% faster, about 100% faster to about 440% faster, about 100% faster to about 420% faster, about 100% faster to about 400% faster, about 100% faster to about 380% faster, about 100% faster to about 360% faster, about 100% faster to about 340% faster, about 100% faster to about 320% faster, about 100% faster to about 300% faster, about 100% faster to about 280% faster, about 100% faster to about 260% faster, about 100% faster to about 240% faster, about 100% faster to about 220% faster, about 100% faster to about 200% faster, about 100% faster to about 180% faster, about 100% faster to about 160% faster, about 100% faster to about 140% faster, about 100% faster to about 120% faster, about 120% faster to about 10,000% faster, about 120% faster to about 9,000% faster, about 120% faster to about 8,000% faster, about 120% faster to about 7,000% faster, about 120% faster to about 6,000% faster, about 120% faster to about 5,000% faster, about 120% faster to about 4,000% faster, about 120% faster to about 3,000% faster, about 120% faster to about 2,000% faster, about 120% faster to about 1,000% faster, about 120% faster to about 500% faster, about 120% faster to about 480% faster, about 120% faster to about 460% faster, about 120% faster to about 440% faster, about 120% faster to about 420% faster, about 120% faster to about 400% faster, about 120% faster to about 380% faster, about 120% faster to about 360% faster, about 120% faster to about 340% faster, about 120% faster to about 320% faster, about 120% faster to about 300% faster, about 120% faster to about 280% faster, about 120% faster to about 260% faster, about 120% faster to about 240% faster, about 120% faster to about 220% faster, about 120% faster to about 200% faster, about 120% faster to about 180% faster, about 120% faster to about 160% faster, about 120% faster to about 140% faster, about 140% faster to about 10,000% faster, about 140% faster to about 9,000% faster, about 140% faster to about 8,000% faster, about 140% faster to about 7,000% faster, about 140% faster to about 6,000% faster, about 140% faster to about 5,000% faster, about 140% faster to about 4,000% faster, about 140% faster to about 3,000% faster, about 140% faster to about 2,000% faster, about 140% faster to about 1,000% faster, about 140% faster to about 500% faster, about 140% faster to about 480% faster, about 140% faster to about 460% faster, about 140% faster to about 440% faster, about 140% faster to about 420% faster, about 140% faster to about 400% faster, about 140% faster to about 380% faster, about 140% faster to about 360% faster, about 140% faster to about 340% faster, about 140% faster to about 320% faster, about 140% faster to about 300% faster, about 140% faster to about 280% faster, about 140% faster to about 260% faster, about 140% faster to about 240% faster, about 140% faster to about 220% faster, about 140% faster to about 200% faster, about 140% faster to about 180% faster, about 140% faster to about 160% faster, about 160% faster to about 10,000% faster, about 160% faster to about 9,000% faster, about 160% faster to about 8,000% faster, about 160% faster to about 7,000% faster, about 160% faster to about 6,000% faster, about 160% faster to about 5,000% faster, about 160% faster to about 4,000% faster, about 160% faster to about 3,000% faster, about 160% faster to about 2,000% faster, about 160% faster to about 1,000% faster, about 160% faster to about 500% faster, about 160% faster to about 480% faster, about 160% faster to about 460% faster, about 160% faster to about 440% faster, about 160% faster to about 420% faster, about 160% faster to about 400% faster, about 160% faster to about 380% faster, about 160% faster to about 360% faster, about 160% faster to about 340% faster, about 160% faster to about 320% faster, about 160% faster to about 300% faster, about 160% faster to about 280% faster, about 160% faster to about 260% faster, about 160% faster to about 240% faster, about 160% faster to about 220% faster, about 160% faster to about 200% faster, about 160% faster to about 180% faster, about 180% faster to about 10,000% faster, about 180% faster to about 9,000% faster, about 180% faster to about 8,000% faster, about 180% faster to about 7,000% faster, about 180% faster to about 6,000% faster, about 180% faster to about 5,000% faster, about 180% faster to about 4,000% faster, about 180% faster to about 3,000% faster, about 180% faster to about 2,000% faster, about 180% faster to about 1,000% faster, about 180% faster to about 500% faster, about 180% faster to about 480% faster, about 180% faster to about 460% faster, about 180% faster to about 440% faster, about 180% faster to about 420% faster, about 180% faster to about 400% faster, about 180% faster to about 380% faster, about 180% faster to about 360% faster, about 180% faster to about 340% faster, about 180% faster to about 320% faster, about 180% faster to about 300% faster, about 180% faster to about 280% faster, about 180% faster to about 260% faster, about 180% faster to about 240% faster, about 180% faster to about 220% faster, about 180% faster to about 200% faster, about 200% faster to about 10,000% faster, about 200% faster to about 9,000% faster, about 200% faster to about 8,000% faster, about 200% faster to about 7,000% faster, about 200% faster to about 6,000% faster, about 200% faster to about 5,000% faster, about 200% faster to about 4,000% faster, about 200% faster to about 3,000% faster, about 200% faster to about 2,000% faster, about 200% faster to about 1,000% faster, about 200% faster to about 500% faster, about 200% faster to about 480% faster, about 200% faster to about 460% faster, about 200% faster to about 440% faster, about 200% faster to about 420% faster, about 200% faster to about 400% faster, about 200% faster to about 380% faster, about 200% faster to about 360% faster, about 200% faster to about 340% faster, about 200% faster to about 320% faster, about 200% faster to about 300% faster, about 200% faster to about 280% faster, about 200% faster to about 260% faster, about 200% faster to about 240% faster, about 200% faster to about 220% faster, about 220% faster to about 10,000% faster, about 220% faster to about 9,000% faster, about 220% faster to about 8,000% faster, about 220% faster to about 7,000% faster, about 220% faster to about 6,000% faster, about 220% faster to about 5,000% faster, about 220% faster to about 4,000% faster, about 220% faster to about 3,000% faster, about 220% faster to about 2,000% faster, about 220% faster to about 1,000% faster, about 220% faster to about 500% faster, about 220% faster to about 480% faster, about 220% faster to about 460% faster, about 220% faster to about 440% faster, about 220% faster to about 420% faster, about 220% faster to about 400% faster, about 220% faster to about 380% faster, about 220% faster to about 360% faster, about 220% faster to about 340% faster, about 220% faster to about 320% faster, about 220% faster to about 300% faster, about 220% faster to about 280% faster, about 220% faster to about 260% faster, about 220% faster to about 240% faster, about 240% faster to about 10,000% faster, about 240% faster to about 9,000% faster, about 240% faster to about 8,000% faster, about 240% faster to about 7,000% faster, about 240% faster to about 6,000% faster, about 240% faster to about 5,000% faster, about 240% faster to about 4,000% faster, about 240% faster to about 3,000% faster, about 240% faster to about 2,000% faster, about 240% faster to about 1,000% faster, about 240% faster to about 500% faster, about 240% faster to about 480% faster, about 240% faster to about 460% faster, about 240% faster to about 440% faster, about 240% faster to about 420% faster, about 240% faster to about 400% faster, about 240% faster to about 380% faster, about 240% faster to about 360% faster, about 240% faster to about 340% faster, about 240% faster to about 320% faster, about 240% faster to about 300% faster, about 240% faster to about 280% faster, about 240% faster to about 260% faster, about 260% faster to about 10,000% faster, about 260% faster to about 9,000% faster, about 260% faster to about 8,000% faster, about 260% faster to about 7,000% faster, about 260% faster to about 6,000% faster, about 260% faster to about 5,000% faster, about 260% faster to about 4,000% faster, about 260% faster to about 3,000% faster, about 260% faster to about 2,000% faster, about 260% faster to about 1,000% faster, about 260% faster to about 500% faster, about 260% faster to about 480% faster, about 260% faster to about 460% faster, about 260% faster to about 440% faster, about 260% faster to about 420% faster, about 260% faster to about 400% faster, about 260% faster to about 380% faster, about 260% faster to about 360% faster, about 260% faster to about 340% faster, about 260% faster to about 320% faster, about 260% faster to about 300% faster, about 260% faster to about 280% faster, about 280% faster to about 10,000% faster, about 280% faster to about 9,000% faster, about 280% faster to about 8,000% faster, about 280% faster to about 7,000% faster, about 280% faster to about 6,000% faster, about 280% faster to about 5,000% faster, about 280% faster to about 4,000% faster, about 280% faster to about 3,000% faster, about 280% faster to about 2,000% faster, about 280% faster to about 1,000% faster, about 280% faster to about 500% faster, about 280% faster to about 480% faster, about 280% faster to about 460% faster, about 280% faster to about 440% faster, about 280% faster to about 420% faster, about 280% faster to about 400% faster, about 280% faster to about 380% faster, about 280% faster to about 360% faster, about 280% faster to about 340% faster, about 280% faster to about 320% faster, about 280% faster to about 300% faster, about 300% faster to about 10,000% faster, about 300% faster to about 9,000% faster, about 300% faster to about 8,000% faster, about 300% faster to about 7,000% faster, about 300% faster to about 6,000% faster, about 300% faster to about 5,000% faster, about 300% faster to about 4,000% faster, about 300% faster to about 3,000% faster, about 300% faster to about 2,000% faster, about 300% faster to about 1,000% faster, about 300% faster to about 500% faster, about 300% faster to about 480% faster, about 300% faster to about 460% faster, about 300% faster to about 440% faster, about 300% faster to about 420% faster, about 300% faster to about 400% faster, about 300% faster to about 380% faster, about 300% faster to about 360% faster, about 300% faster to about 340% faster, about 300% faster to about 320% faster, about 320% faster to about 10,000% faster, about 320% faster to about 9,000% faster, about 320% faster to about 8,000% faster, about 320% faster to about 7,000% faster, about 320% faster to about 6,000% faster, about 320% faster to about 5,000% faster, about 320% faster to about 4,000% faster, about 320% faster to about 3,000% faster, about 320% faster to about 2,000% faster, about 320% faster to about 1,000% faster, about 320% faster to about 500% faster, about 320% faster to about 480% faster, about 320% faster to about 460% faster, about 320% faster to about 440% faster, about 320% faster to about 420% faster, about 320% faster to about 400% faster, about 320% faster to about 380% faster, about 320% faster to about 360% faster, about 320% faster to about 340% faster, about 340% faster to about 10,000% faster, about 340% faster to about 9,000% faster, about 340% faster to about 8,000% faster, about 340% faster to about 7,000% faster, about 340% faster to about 6,000% faster, about 340% faster to about 5,000% faster, about 340% faster to about 4,000% faster, about 340% faster to about 3,000% faster, about 340% faster to about 2,000% faster, about 340% faster to about 1,000% faster, about 340% faster to about 500% faster, about 340% faster to about 480% faster, about 340% faster to about 460% faster, about 340% faster to about 440% faster, about 340% faster to about 420% faster, about 340% faster to about 400% faster, about 340% faster to about 380% faster, about 340% faster to about 360% faster, about 360% faster to about 10,000% faster, about 360% faster to about 9,000% faster, about 360% faster to about 8,000% faster, about 360% faster to about 7,000% faster, about 360% faster to about 6,000% faster, about 360% faster to about 5,000% faster, about 360% faster to about 4,000% faster, about 360% faster to about 3,000% faster, about 360% faster to about 2,000% faster, about 360% faster to about 1,000% faster, about 360% faster to about 500% faster, about 360% faster to about 480% faster, about 360% faster to about 460% faster, about 360% faster to about 440% faster, about 360% faster to about 420% faster, about 360% faster to about 400% faster, about 360% faster to about 380% faster, about 380% faster to about 10,000% faster, about 380% faster to about 9,000% faster, about 380% faster to about 8,000% faster, about 380% faster to about 7,000% faster, about 380% faster to about 6,000% faster, about 380% faster to about 5,000% faster, about 380% faster to about 4,000% faster, about 380% faster to about 3,000% faster, about 380% faster to about 2,000% faster, about 380% faster to about 1,000% faster, about 380% faster to about 500% faster, about 380% faster to about 480% faster, about 380% faster to about 460% faster, about 380% faster to about 440% faster, about 380% faster to about 420% faster, about 380% faster to about 400% faster, about 400% faster to about 10,000% faster, about 400% faster to about 9,000% faster, about 400% faster to about 8,000% faster, about 400% faster to about 7,000% faster, about 400% faster to about 6,000% faster, about 400% faster to about 5,000% faster, about 400% faster to about 4,000% faster, about 400% faster to about 3,000% faster, about 400% faster to about 2,000% faster, about 400% faster to about 1,000% faster, about 400% faster to about 500% faster, about 400% faster to about 480% faster, about 400% faster to about 460% faster, about 400% faster to about 440% faster, about 400% faster to about 420% faster, about 420% faster to about 10,000% faster, about 420% faster to about 9,000% faster, about 420% faster to about 8,000% faster, about 420% faster to about 7,000% faster, about 420% faster to about 6,000% faster, about 420% faster to about 5,000% faster, about 420% faster to about 4,000% faster, about 420% faster to about 3,000% faster, about 420% faster to about 2,000% faster, about 420% faster to about 1,000% faster, about 420% faster to about 500% faster, about 420% faster to about 480% faster, about 420% faster to about 460% faster, about 420% faster to about 440% faster, about 440% faster to about 10,000% faster, about 440% faster to about 9,000% faster, about 440% faster to about 8,000% faster, about 440% faster to about 7,000% faster, about 440% faster to about 6,000% faster, about 440% faster to about 5,000% faster, about 440% faster to about 4,000% faster, about 440% faster to about 3,000% faster, about 440% faster to about 2,000% faster, about 440% faster to about 1,000% faster, about 440% faster to about 500% faster, about 440% faster to about 480% faster, about 440% faster to about 460% faster, about 460% faster to about 10,000% faster, about 460% faster to about 9,000% faster, about 460% faster to about 8,000% faster, about 460% faster to about 7,000% faster, about 460% faster to about 6,000% faster, about 460% faster to about 5,000% faster, about 460% faster to about 4,000% faster, about 460% faster to about 3,000% faster, about 460% faster to about 2,000% faster, about 460% faster to about 1,000% faster, about 460% faster to about 500% faster, about 460% faster to about 480% faster, about 480% faster to about 10,000% faster, about 480% faster to about 9,000% faster, about 480% faster to about 8,000% faster, about 480% faster to about 7,000% faster, about 480% faster to about 6,000% faster, about 480% faster to about 5,000% faster, about 480% faster to about 4,000% faster, about 480% faster to about 3,000% faster, about 480% faster to about 2,000% faster, about 480% faster to about 1,000% faster, about 480% faster to about 500% faster, about 500% faster to about 10,000% faster, about 500% faster to about 9,000% faster, about 500% faster to about 8,000% faster, about 500% faster to about 7,000% faster, about 500% faster to about 6,000% faster, about 500% faster to about 5,000% faster, about 500% faster to about 4,000% faster, about 500% faster to about 3,000% faster, about 500% faster to about 2,000% faster, about 500% faster to about 1,000% faster, about 1,000% faster to about 10,000% faster, about 1,000% faster to about 9,000% faster, about 1,000% faster to about 8,000% faster, about 1,000% faster to about 7,000% faster, about 1,000% faster to about 6,000% faster, about 1,000% faster to about 5,000% faster, about 1,000% faster to about 4,000% faster, about 1,000% faster to about 3,000% faster, about 1,000% faster to about 2,000% faster, about 2,000% faster to about 10,000% faster, about 2,000% faster to about 9,000% faster, about 2,000% faster to about 8,000% faster, about 2,000% faster to about 7,000% faster, about 2,000% faster to about 6,000% faster, about 2,000% faster to about 5,000% faster, about 2,000% faster to about 4,000% faster, about 2,000% faster to about 3,000% faster, about 3,000% faster to about 10,000% faster, about 3,000% faster to about 9,000% faster, about 3,000% faster to about 8,000% faster, about 3,000% faster to about 7,000% faster, about 3,000% faster to about 6,000% faster, about 3,000% faster to about 5,000% faster, about 3,000% faster to about 4,000% faster, about 4,000% faster to about 10,000% faster, about 4,000% faster to about 9,000% faster, about 4,000% faster to about 8,000% faster, about 4,000% faster to about 7,000% faster, about 4,000% faster to about 6,000% faster, about 4,000% faster to about 5,000% faster, about 5,000% faster to about 10,000% faster, about 5,000% faster to about 9,000% faster, about 5,000% faster to about 8,000% faster, about 5,000% faster to about 7,000% faster, about 5,000% faster to about 6,000% faster, about 6,000% faster to about 10,000% faster, about 6,000% faster to about 9,000% faster, about 6,000% faster to about 8,000% faster, about 6,000% faster to about 7,000% faster, about 7,000% faster to about 10,000% faster, about 7,000% faster to about 9,000% faster, about 7,000% faster to about 8,000% faster, about 8,000% faster to about 10,000% faster, about 8,000% faster to about 9,000% faster, or about 9,000% faster to about 10,000% faster) than the dissociation rate at a pH of about 7.0 to about 8.0 (e.g., about 7.0 to about 7.9, about 7.0 to about 7.8, about 7.0 to about 7.7, about 7.0 to about 7.6, about 7.0 to about 7.5, about 7.0 to about 7.4, about 7.0 to about 7.3, about 7.0 to about 7.2, about 7.0 to about 7.1, about 7.1 to about 8.0, about 7.1 to about 7.9, about 7.1 to about 7.8, about 7.1 to about 7.7, about 7.1 to about 7.6, about 7.1 to about 7.5, about 7.1 to about 7.4, about 7.1 to about 7.3, about 7.1 to about 7.2, about 7.2 to about 8.0, about 7.2 to about 7.9, about 7.2 to about 7.8, about 7.2 to about 7.7, about 7.2 to about 7.6, about 7.2 to about 7.5, about 7.2 to about 7.4, about 7.2 to about 7.3, about 7.3 to about 8.0, about 7.3 to about 7.9, about 7.3 to about 7.8, about 7.3 to about 7.7, about 7.3 to about 7.6, about 7.3 to about 7.5, about 7.3 to about 7.4, about 7.4 to about 8.0, about 7.4 to about 7.9, about 7.4 to about 7.8, about 7.4 to about 7.7, about 7.4 to about 7.6, about 7.4 to about 7.5, about 7.5 to about 8.0, about 7.5 to about 7.9, about 7.5 to about 7.8, about 7.5 to about 7.7, about 7.5 to about 7.6, about 7.6 to about 8.0, about 7.6 to about 7.9, about 7.6 to about 7.8, about 7.6 to about 7.7, about 7.7 to about 8.0, about 7.7 to about 7.9, about 7.7 to about 7.8, about 7.8 to about 8.0, about 7.8 to about 7.9, or about 7.9 to about 8.0).

[0589] In some embodiments of any of the antigen-binding protein constructs (ABPCs) described herein, the dissociation constant (K_{D}) of the first antigen-binding domain (and optionally the second antigen-binding domain, if present) at a pH of about 4.0 to about 6.5 (e.g., any of the subranges of this range described herein) is greater (e.g., detectably greater) (e.g., at least 5% greater, at least 10% greater, at least 15% greater, at least 20% greater, at least 25% greater, at least 30% greater, at least 35% greater, at least 40% greater, at least 45% greater, at least 50% greater, at least 55% greater, at least 60% greater, at least 65% greater, at least 70% greater, at least 80% greater, at least 85% greater, at least 90% greater, at least 95% greater, at least 100% greater, at least 120% greater, at least 140% greater, at least 160% greater, at least 180% greater, at least 200% greater, at least 220% greater, at least 240% greater, at least 260% greater, at least 280% greater, at least 300% greater, at least 320% greater, at least 340% greater, at least 360% greater, at least 380% greater, at least 400% greater, at least 420% greater, at least 440% greater, at least 460% greater, at least 480% greater, at least 500% greater, at least 1,000% greater, at least 2,000% greater, at least 3,000% greater, at least 4,000% greater, at least 5,000% greater, at least 6,000% greater, at least 7,000% greater, at least 8,000% greater, at least 9,000% greater, or at least 10,000% greater, or about 5% greater to about 10,000% greater, about 5% greater to about 9,000% greater, about 5% greater to about 8,000% greater, about 5% greater to about 7,000% greater, about 5% greater to about 6,000% greater, about 5% greater to about 5,000% greater, about 5% greater to about 4,000% greater, about 5% greater to about 3,000% greater, about 5% greater to about 2,000% greater, about 5% greater to about 1,000% greater, about 5% greater to about 500% greater, about 5% greater to about 480% greater, about 5% greater to about 460% greater, about 5% greater to about 440% greater, about 5% greater to about 420% greater, about 5% greater to about 400% greater, about 5% greater to about 380% greater, about 5% greater to about 360% greater, about 5% greater to about 340% greater, about 5% greater to about 320% greater, about 5% greater to about 300% greater, about 5% greater to about 280% greater, about 5% greater to about 260% greater, about 5% greater to about 240% greater, about 5% greater to about 220% greater, about 5% greater to about 200% greater, about 5% greater to about 180% greater, about 5% greater to about 160% greater, about 5% greater to about 140% greater, about 5% greater to about 120% greater, about 5% greater to about 100% greater, about 5% greater to about 95% greater, about 5% greater to about 90% greater, about 5% greater to about 85% greater, about 5% greater to about 80% greater, about 5% greater to about 75% greater, about 5% greater to about 70% greater, about 5% greater to about 65% greater, about 5% greater to about 60% greater, about 5% greater to about 55% greater, about 5% greater to about 50% greater, about 5% greater to about 45% greater, about 5% greater to about 40% greater, about 5% greater to about 35% greater, about 5% greater to about 30% greater, about 5% greater to about 25% greater, about 5% greater to about 20% greater, about 5% greater to about 15% greater, about 5% greater to about 10% greater, about 10% greater to about 10,000% greater, about 10% greater to about 9,000% greater, about 10% greater to about 8,000% greater, about 10% greater to about 7,000% greater, about 10% greater to about 6,000% greater, about 10% greater to about 5,000% greater, about 10% greater to about 4,000% greater, about 10% greater to about 3,000% greater, about 10% greater to about 2,000% greater, about 10% greater to about 1,000% greater, about 10% greater to about 500% greater, about 10% greater to about 480% greater, about 10% greater to about 460% greater, about 10% greater to about 440% greater, about 10% greater to about 420% greater, about 10% greater to about 400% greater, about 10% greater to about 380% greater, about 10% greater to about 360% greater, about 10% greater to about 340% greater, about 10% greater to about 320% greater, about 10% greater to about 300% greater, about 10% greater to about 280% greater, about 10% greater to about 260% greater, about 10% greater to about 240% greater, about 10% greater to about 220% greater, about 10% greater to about 200% greater, about 10% greater to about 180% greater, about 10% greater to about 160% greater, about 10% greater to about 140% greater, about 10% greater to about 120% greater, about 10% greater to about 100% greater, about 10% greater to about 95% greater, about 10% greater to about 90% greater, about 10% greater to about 85% greater, about 10% greater to about 80% greater, about 10% greater to about 75% greater, about 10% greater to about 70% greater, about 10% greater to about 65% greater, about 10% greater to about 60% greater, about 10% greater to about 55% greater, about 10% greater to about 50% greater, about 10% greater to about 45% greater, about 10% greater to about 40% greater, about 10% greater to about 35% greater, about 10% greater to about 30% greater, about 10% greater to about 25% greater, about 10% greater to about 20% greater, about 10% greater to about 15% greater, about 15% greater to about 10,000% greater, about 15% greater to about 9,000% greater, about 15% greater to about 8,000% greater, about 15% greater to about 7,000% greater, about 15% greater to about 6,000% greater, about 15% greater to about 5,000% greater, about 15% greater to about 4,000% greater, about 15% greater to about 3,000% greater, about 15% greater to about 2,000% greater, about 15% greater to about 1,000% greater, about 15% greater to about 500% greater, about 15% greater to about 480% greater, about 15% greater to about 460% greater, about 15% greater to about 440% greater, about 15% greater to about 420% greater, about 15% greater to about 400% greater, about 15% greater to about 380% greater, about 15% greater to about 360% greater, about 15% greater to about 340% greater, about 15% greater to about 320% greater, about 15% greater to about 300% greater, about 15% greater to about 280% greater, about 15% greater to about 260% greater, about 15% greater to about 240% greater, about 15% greater to about 220% greater, about 15% greater to about 200% greater, about 15% greater to about 180% greater, about 15% greater to about 160% greater, about 15% greater to about 140% greater, about 15% greater to about 120% greater, about 15% greater to about 100% greater, about 15% greater to about 95% greater, about 15% greater to about 90% greater, about 15% greater to about 85% greater, about 15% greater to about 80% greater, about 15% greater to about 75% greater, about 15% greater to about 70% greater, about 15% greater to about 65% greater, about 15% greater to about 60% greater, about 15% greater to about 55% greater, about 15% greater to about 50% greater, about 15% greater to about 45% greater, about 15% greater to about 40% greater, about 15% greater to about 35% greater, about 15% greater to about 30% greater, about 15% greater to about 25% greater, about 15% greater to about 20% greater, about 20% greater to about 10,000% greater, about 20% greater to about 9,000% greater, about 20% greater to about 8,000% greater, about 20% greater to about 7,000% greater, about 20% greater to about 6,000% greater, about 20% greater to about 5,000% greater, about 20% greater to about 4,000% greater, about 20% greater to about 3,000% greater, about 20% greater to about 2,000% greater, about 20% greater to about 1,000% greater, about 20% greater to about 500% greater, about 20% greater to about 480% greater, about 20% greater to about 460% greater, about 20% greater to about 440% greater, about 20% greater to about 420% greater, about 20% greater to about 400% greater, about 20% greater to about 380% greater, about 20% greater to about 360% greater, about 20% greater to about 340% greater, about 20% greater to about 320% greater, about 20% greater to about 300% greater, about 20% greater to about 280% greater, about 20% greater to about 260% greater, about 20% greater to about 240% greater, about 20% greater to about 220% greater, about 20% greater to about 200% greater, about 20% greater to about 180% greater, about 20% greater to about 160% greater, about 20% greater to about 140% greater, about 20% greater to about 120% greater, about 20% greater to about 100% greater, about 20% greater to about 95% greater, about 20% greater to about 90% greater, about 20% greater to about 85% greater, about 20% greater to about 80% greater, about 20% greater to about 75% greater, about 20% greater to about 70% greater, about 20% greater to about 65% greater, about 20% greater to about 60% greater, about 20% greater to about 55% greater, about 20% greater to about 50% greater, about 20% greater to about 45% greater, about 20% greater to about 40% greater, about 20% greater to about 35% greater, about 20% greater to about 30% greater, about 20% greater to about 25% greater, about 25% greater to about 10,000% greater, about 25% greater to about 9,000% greater, about 25% greater to about 8,000% greater, about 25% greater to about 7,000% greater, about 25% greater to about 6,000% greater, about 25% greater to about 5,000% greater, about 25% greater to about 4,000% greater, about 25% greater to about 3,000% greater, about 25% greater to about 2,000% greater, about 25% greater to about 1,000% greater, about 25% greater to about 500% greater, about 25% greater to about 480% greater, about 25% greater to about 460% greater, about 25% greater to about 440% greater, about 25% greater to about 420% greater, about 25% greater to about 400% greater, about 25% greater to about 380% greater, about 25% greater to about 360% greater, about 25% greater to about 340% greater, about 25% greater to about 320% greater, about 25% greater to about 300% greater, about 25% greater to about 280% greater, about 25% greater to about 260% greater, about 25% greater to about 240% greater, about 25% greater to about 220% greater, about 25% greater to about 200% greater, about 25% greater to about 180% greater, about 25% greater to about 160% greater, about 25% greater to about 140% greater, about 25% greater to about 120% greater, about 25% greater to about 100% greater, about 25% greater to about 95% greater, about 25% greater to about 90% greater, about 25% greater to about 85% greater, about 25% greater to about 80% greater, about 25% greater to about 75% greater, about 25% greater to about 70% greater, about 25% greater to about 65% greater, about 25% greater to about 60% greater, about 25% greater to about 55% greater, about 25% greater to about 50% greater, about 25% greater to about 45% greater, about 25% greater to about 40% greater, about 25% greater to about 35% greater, about 25% greater to about 30% greater, about 30% greater to about 10,000% greater, about 30% greater to about 9,000% greater, about 30% greater to about 8,000% greater, about 30% greater to about 7,000% greater, about 30% greater to about 6,000% greater, about 30% greater to about 5,000% greater, about 30% greater to about 4,000% greater, about 30% greater to about 3,000% greater, about 30% greater to about 2,000% greater, about 30% greater to about 1,000% greater, about 30% greater to about 500% greater, about 30% greater to about 480% greater, about 30% greater to about 460% greater, about 30% greater to about 440% greater, about 30% greater to about 420% greater, about 30% greater to about 400% greater, about 30% greater to about 380% greater, about 30% greater to about 360% greater, about 30% greater to about 340% greater, about 30% greater to about 320% greater, about 30% greater to about 300% greater, about 30% greater to about 280% greater, about 30% greater to about 260% greater, about 30% greater to about 240% greater, about 30% greater to about 220% greater, about 30% greater to about 200% greater, about 30% greater to about 180% greater, about 30% greater to about 160% greater, about 30% greater to about 140% greater, about 30% greater to about 120% greater, about 30% greater to about 100% greater, about 30% greater to about 95% greater, about 30% greater to about 90% greater, about 30% greater to about 85% greater, about 30% greater to about 80% greater, about 30% greater to about 75% greater, about 30% greater to about 70% greater, about 30% greater to about 65% greater, about 30% greater to about 60% greater, about 30% greater to about 55% greater, about 30% greater to about 50% greater, about 30% greater to about 45% greater, about 30% greater to about 40% greater, about 30% greater to about 35% greater, about 35% greater to about 10,000% greater, about 35% greater to about 9,000% greater, about 35% greater to about 8,000% greater, about 35% greater to about 7,000% greater, about 35% greater to about 6,000% greater, about 35% greater to about 5,000% greater, about 35% greater to about 4,000% greater, about 35% greater to about 3,000% greater, about 35% greater to about 2,000% greater, about 35% greater to about 1,000% greater, about 35% greater to about 500% greater, about 35% greater to about 480% greater, about 35% greater to about 460% greater, about 35% greater to about 440% greater, about 35% greater to about 420% greater, about 35% greater to about 400% greater, about 35% greater to about 380% greater, about 35% greater to about 360% greater, about 35% greater to about 340% greater, about 35% greater to about 320% greater, about 35% greater to about 300% greater, about 35% greater to about 280% greater, about 35% greater to about 260% greater, about 35% greater to about 240% greater, about 35% greater to about 220% greater, about 35% greater to about 200% greater, about 35% greater to about 180% greater, about 35% greater to about 160% greater, about 35% greater to about 140% greater, about 35% greater to about 120% greater, about 35% greater to about 100% greater, about 35% greater to about 95% greater, about 35% greater to about 90% greater, about 35% greater to about 85% greater, about 35% greater to about 80% greater, about 35% greater to about 75% greater, about 35% greater to about 70% greater, about 35% greater to about 65% greater, about 35% greater to about 60% greater, about 35% greater to about 55% greater, about 35% greater to about 50% greater, about 35% greater to about 45% greater, about 35% greater to about 40% greater, about 40% greater to about 10,000% greater, about 40% greater to about 9,000% greater, about 40% greater to about 8,000% greater, about 40% greater to about 7,000% greater, about 40% greater to about 6,000% greater, about 40% greater to about 5,000% greater, about 40% greater to about 4,000% greater, about 40% greater to about 3,000% greater, about 40% greater to about 2,000% greater, about 40% greater to about 1,000% greater, about 40% greater to about 500% greater, about 40% greater to about 480% greater, about 40% greater to about 460% greater, about 40% greater to about 440% greater, about 40% greater to about 420% greater, about 40% greater to about 400% greater, about 40% greater to about 380% greater, about 40% greater to about 360% greater, about 40% greater to about 340% greater, about 40% greater to about 320% greater, about 40% greater to about 300% greater, about 40% greater to about 280% greater, about 40% greater to about 260% greater, about 40% greater to about 240% greater, about 40% greater to about 220% greater, about 40% greater to about 200% greater, about 40% greater to about 180% greater, about 40% greater to about 160% greater, about 40% greater to about 140% greater, about 40% greater to about 120% greater, about 40% greater to about 100% greater, about 40% greater to about 95% greater, about 40% greater to about 90% greater, about 40% greater to about 85% greater, about 40% greater to about 80% greater, about 40% greater to about 75% greater, about 40% greater to about 70% greater, about 40% greater to about 65% greater, about 40% greater to about 60% greater, about 40% greater to about 55% greater, about 40% greater to about 50% greater, about 40% greater to about 45% greater, about 45% greater to about 10,000% greater, about 45% greater to about 9,000% greater, about 45% greater to about 8,000% greater, about 45% greater to about 7,000% greater, about 45% greater to about 6,000% greater, about 45% greater to about 5,000% greater, about 45% greater to about 4,000% greater, about 45% greater to about 3,000% greater, about 45% greater to about 2,000% greater, about 45% greater to about 1,000% greater, about 45% greater to about 500% greater, about 45% greater to about 480% greater, about 45% greater to about 460% greater, about 45% greater to about 440% greater, about 45% greater to about 420% greater, about 45% greater to about 400% greater, about 45% greater to about 380% greater, about 45% greater to about 360% greater, about 45% greater to about 340% greater, about 45% greater to about 320% greater, about 45% greater to about 300% greater, about 45% greater to about 280% greater, about 45% greater to about 260% greater, about 45% greater to about 240% greater, about 45% greater to about 220% greater, about 45% greater to about 200% greater, about 45% greater to about 180% greater, about 45% greater to about 160% greater, about 45% greater to about 140% greater, about 45% greater to about 120% greater, about 45% greater to about 100% greater, about 45% greater to about 95% greater, about 45% greater to about 90% greater, about 45% greater to about 85% greater, about 45% greater to about 80% greater, about 45% greater to about 75% greater, about 45% greater to about 70% greater, about 45% greater to about 65% greater, about 45% greater to about 60% greater, about 45% greater to about 55% greater, about 45% greater to about 50% greater, about 50% greater to about 10,000% greater, about 50% greater to about 9,000% greater, about 50% greater to about 8,000% greater, about 50% greater to about 7,000% greater, about 50% greater to about 6,000% greater, about 50% greater to about 5,000% greater, about 50% greater to about 4,000% greater, about 50% greater to about 3,000% greater, about 50% greater to about 2,000% greater, about 50% greater to about 1,000% greater, about 50% greater to about 500% greater, about 50% greater to about 480% greater, about 50% greater to about 460% greater, about 50% greater to about 440% greater, about 50% greater to about 420% greater, about 50% greater to about 400% greater, about 50% greater to about 380% greater, about 50% greater to about 360% greater, about 50% greater to about 340% greater, about 50% greater to about 320% greater, about 50% greater to about 300% greater, about 50% greater to about 280% greater, about 50% greater to about 260% greater, about 50% greater to about 240% greater, about 50% greater to about 220% greater, about 50% greater to about 200% greater, about 50% greater to about 180% greater, about 50% greater to about 160% greater, about 50% greater to about 140% greater, about 50% greater to about 120% greater, about 50% greater to about 100% greater, about 50% greater to about 95% greater, about 50% greater to about 90% greater, about 50% greater to about 85% greater, about 50% greater to about 80% greater, about 50% greater to about 75% greater, about 50% greater to about 70% greater, about 50% greater to about 65% greater, about 50% greater to about 60% greater, about 50% greater to about 55% greater, about 55% greater to about 10,000% greater, about 55% greater to about 9,000% greater, about 55% greater to about 8,000% greater, about 55% greater to about 7,000% greater, about 55% greater to about 6,000% greater, about 55% greater to about 5,000% greater, about 55% greater to about 4,000% greater, about 55% greater to about 3,000% greater, about 55% greater to about 2,000% greater, about 55% greater to about 1,000% greater, about 55% greater to about 500% greater, about 55% greater to about 480% greater, about 55% greater to about 460% greater, about 55% greater to about 440% greater, about 55% greater to about 420% greater, about 55% greater to about 400% greater, about 55% greater to about 380% greater, about 55% greater to about 360% greater, about 55% greater to about 340% greater, about 55% greater to about 320% greater, about 55% greater to about 300% greater, about 55% greater to about 280% greater, about 55% greater to about 260% greater, about 55% greater to about 240% greater, about 55% greater to about 220% greater, about 55% greater to about 200% greater, about 55% greater to about 180% greater, about 55% greater to about 160% greater, about 55% greater to about 140% greater, about 55% greater to about 120% greater, about 55% greater to about 100% greater, about 55% greater to about 95% greater, about 55% greater to about 90% greater, about 55% greater to about 85% greater, about 55% greater to about 80% greater, about 55% greater to about 75% greater, about 55% greater to about 70% greater, about 55% greater to about 65% greater, about 55% greater to about 60% greater, about 60% greater to about 10,000% greater, about 60% greater to about 9,000% greater, about 60% greater to about 8,000% greater, about 60% greater to about 7,000% greater, about 60% greater to about 6,000% greater, about 60% greater to about 5,000% greater, about 60% greater to about 4,000% greater, about 60% greater to about 3,000% greater, about 60% greater to about 2,000% greater, about 60% greater to about 1,000% greater, about 60% greater to about 500% greater, about 60% greater to about 480% greater, about 60% greater to about 460% greater, about 60% greater to about 440% greater, about 60% greater to about 420% greater, about 60% greater to about 400% greater, about 60% greater to about 380% greater, about 60% greater to about 360% greater, about 60% greater to about 340% greater, about 60% greater to about 320% greater, about 60% greater to about 300% greater, about 60% greater to about 280% greater, about 60% greater to about 260% greater, about 60% greater to about 240% greater, about 60% greater to about 220% greater, about 60% greater to about 200% greater, about 60% greater to about 180% greater, about 60% greater to about 160% greater, about 60% greater to about 140% greater, about 60% greater to about 120% greater, about 60% greater to about 100% greater, about 60% greater to about 95% greater, about 60% greater to about 90% greater, about 60% greater to about 85% greater, about 60% greater to about 80% greater, about 60% greater to about 75% greater, about 60% greater to about 70% greater, about 60% greater to about 65% greater, about 65% greater to about 10,000% greater, about 65% greater to about 9,000% greater, about 65% greater to about 8,000% greater, about 65% greater to about 7,000% greater, about 65% greater to about 6,000% greater, about 65% greater to about 5,000% greater, about 65% greater to about 4,000% greater, about 65% greater to about 3,000% greater, about 65% greater to about 2,000% greater, about 65% greater to about 1,000% greater, about 65% greater to about 500% greater, about 65% greater to about 480% greater, about 65% greater to about 460% greater, about 65% greater to about 440% greater, about 65% greater to about 420% greater, about 65% greater to about 400% greater, about 65% greater to about 380% greater, about 65% greater to about 360% greater, about 65% greater to about 340% greater, about 65% greater to about 320% greater, about 65% greater to about 300% greater, about 65% greater to about 280% greater, about 65% greater to about 260% greater, about 65% greater to about 240% greater, about 65% greater to about 220% greater, about 65% greater to about 200% greater, about 65% greater to about 180% greater, about 65% greater to about 160% greater, about 65% greater to about 140% greater, about 65% greater to about 120% greater, about 65% greater to about 100% greater, about 65% greater to about 95% greater, about 65% greater to about 90% greater, about 65% greater to about 85% greater, about 65% greater to about 80% greater, about 65% greater to about 75% greater, about 65% greater to about 70% greater, about 70% greater to about 10,000% greater, about 70% greater to about 9,000% greater, about 70% greater to about 8,000% greater, about 70% greater to about 7,000% greater, about 70% greater to about 6,000% greater, about 70% greater to about 5,000% greater, about 70% greater to about 4,000% greater, about 70% greater to about 3,000% greater, about 70% greater to about 2,000% greater, about 70% greater to about 1,000% greater, about 70% greater to about 500% greater, about 70% greater to about 480% greater, about 70% greater to about 460% greater, about 70% greater to about 440% greater, about 70% greater to about 420% greater, about 70% greater to about 400% greater, about 70% greater to about 380% greater, about 70% greater to about 360% greater, about 70% greater to about 340% greater, about 70% greater to about 320% greater, about 70% greater to about 300% greater, about 70% greater to about 280% greater, about 70% greater to about 260% greater, about 70% greater to about 240% greater, about 70% greater to about 220% greater, about 70% greater to about 200% greater, about 70% greater to about 180% greater, about 70% greater to about 160% greater, about 70% greater to about 140% greater, about 70% greater to about 120% greater, about 70% greater to about 100% greater, about 70% greater to about 95% greater, about 70% greater to about 90% greater, about 70% greater to about 85% greater, about 70% greater to about 80% greater, about 70% greater to about 75% greater, about 75% greater to about 10,000% greater, about 75% greater to about 9,000% greater, about 75% greater to about 8,000% greater, about 75% greater to about 7,000% greater, about 75% greater to about 6,000% greater, about 75% greater to about 5,000% greater, about 75% greater to about 4,000% greater, about 75% greater to about 3,000% greater, about 75% greater to about 2,000% greater, about 75% greater to about 1,000% greater, about 75% greater to about 500% greater, about 75% greater to about 480% greater, about 75% greater to about 460% greater, about 75% greater to about 440% greater, about 75% greater to about 420% greater, about 75% greater to about 400% greater, about 75% greater to about 380% greater, about 75% greater to about 360% greater, about 75% greater to about 340% greater, about 75% greater to about 320% greater, about 75% greater to about 300% greater, about 75% greater to about 280% greater, about 75% greater to about 260% greater, about 75% greater to about 240% greater, about 75% greater to about 220% greater, about 75% greater to about 200% greater, about 75% greater to about 180% greater, about 75% greater to about 160% greater, about 75% greater to about 140% greater, about 75% greater to about 120% greater, about 75% greater to about 100% greater, about 75% greater to about 95% greater, about 75% greater to about 90% greater, about 75% greater to about 85% greater, about 75% greater to about 80% greater, about 80% greater to about 10,000% greater, about 80% greater to about 9,000% greater, about 80% greater to about 8,000% greater, about 80% greater to about 7,000% greater, about 80% greater to about 6,000% greater, about 80% greater to about 5,000% greater, about 80% greater to about 4,000% greater, about 80% greater to about 3,000% greater, about 80% greater to about 2,000% greater, about 80% greater to about 1,000% greater, about 80% greater to about 500% greater, about 80% greater to about 480% greater, about 80% greater to about 460% greater, about 80% greater to about 440% greater, about 80% greater to about 420% greater, about 80% greater to about 400% greater, about 80% greater to about 380% greater, about 80% greater to about 360% greater, about 80% greater to about 340% greater, about 80% greater to about 320% greater, about 80% greater to about 300% greater, about 80% greater to about 280% greater, about 80% greater to about 260% greater, about 80% greater to about 240% greater, about 80% greater to about 220% greater, about 80% greater to about 200% greater, about 80% greater to about 180% greater, about 80% greater to about 160% greater, about 80% greater to about 140% greater, about 80% greater to about 120% greater, about 80% greater to about 100% greater, about 80% greater to about 95% greater, about 80% greater to about 90% greater, about 80% greater to about 85% greater, about 85% greater to about 10,000% greater, about 85% greater to about 9,000% greater, about 85% greater to about 8,000% greater, about 85% greater to about 7,000% greater, about 85% greater to about 6,000% greater, about 85% greater to about 5,000% greater, about 85% greater to about 4,000% greater, about 85% greater to about 3,000% greater, about 85% greater to about 2,000% greater, about 85% greater to about 1,000% greater, about 85% greater to about 500% greater, about 85% greater to about 480% greater, about 85% greater to about 460% greater, about 85% greater to about 440% greater, about 85% greater to about 420% greater, about 85% greater to about 400% greater, about 85% greater to about 380% greater, about 85% greater to about 360% greater, about 85% greater to about 340% greater, about 85% greater to about 320% greater, about 85% greater to about 300% greater, about 85% greater to about 280% greater, about 85% greater to about 260% greater, about 85% greater to about 240% greater, about 85% greater to about 220% greater, about 85% greater to about 200% greater, about 85% greater to about 180% greater, about 85% greater to about 160% greater, about 85% greater to about 140% greater, about 85% greater to about 120% greater, about 85% greater to about 100% greater, about 85% greater to about 95% greater, about 85% greater to about 90% greater, about 90% greater to about 10,000% greater, about 90% greater to about 9,000% greater, about 90% greater to about 8,000% greater, about 90% greater to about 7,000% greater, about 90% greater to about 6,000% greater, about 90% greater to about 5,000% greater, about 90% greater to about 4,000% greater, about 90% greater to about 3,000% greater, about 90% greater to about 2,000% greater, about 90% greater to about 1,000% greater, about 90% greater to about 500% greater, about 90% greater to about 480% greater, about 90% greater to about 460% greater, about 90% greater to about 440% greater, about 90% greater to about 420% greater, about 90% greater to about 400% greater, about 90% greater to about 380% greater, about 90% greater to about 360% greater, about 90% greater to about 340% greater, about 90% greater to about 320% greater, about 90% greater to about 300% greater, about 90% greater to about 280% greater, about 90% greater to about 260% greater, about 90% greater to about 240% greater, about 90% greater to about 220% greater, about 90% greater to about 200% greater, about 90% greater to about 180% greater, about 90% greater to about 160% greater, about 90% greater to about 140% greater, about 90% greater to about 120% greater, about 90% greater to about 100% greater, about 90% greater to about 95% greater, about 95% greater to about 10,000% greater, about 95% greater to about 9,000% greater, about 95% greater to about 8,000% greater, about 95% greater to about 7,000% greater, about 95% greater to about 6,000% greater, about 95% greater to about 5,000% greater, about 95% greater to about 4,000% greater, about 95% greater to about 3,000% greater, about 95% greater to about 2,000% greater, about 95% greater to about 1,000% greater, about 95% greater to about 500% greater, about 95% greater to about 480% greater, about 95% greater to about 460% greater, about 95% greater to about 440% greater, about 95% greater to about 420% greater, about 95% greater to about 400% greater, about 95% greater to about 380% greater, about 95% greater to about 360% greater, about 95% greater to about 340% greater, about 95% greater to about 320% greater, about 95% greater to about 300% greater, about 95% greater to about 280% greater, about 95% greater to about 260% greater, about 95% greater to about 240% greater, about 95% greater to about 220% greater, about 95% greater to about 200% greater, about 95% greater to about 180% greater, about 95% greater to about 160% greater, about 95% greater to about 140% greater, about 95% greater to about 120% greater, about 95% greater to about 100% greater, about 100% greater to about 10,000% greater, about 100% greater to about 9,000% greater, about 100% greater to about 8,000% greater, about 100% greater to about 7,000% greater, about 100% greater to about 6,000% greater, about 100% greater to about 5,000% greater, about 100% greater to about 4,000% greater, about 100% greater to about 3,000% greater, about 100% greater to about 2,000% greater, about 100% greater to about 1,000% greater, about 100% greater to about 500% greater, about 100% greater to about 480% greater, about 100% greater to about 460% greater, about 100% greater to about 440% greater, about 100% greater to about 420% greater, about 100% greater to about 400% greater, about 100% greater to about 380% greater, about 100% greater to about 360% greater, about 100% greater to about 340% greater, about 100% greater to about 320% greater, about 100% greater to about 300% greater, about 100% greater to about 280% greater, about 100% greater to about 260% greater, about 100% greater to about 240% greater, about 100% greater to about 220% greater, about 100% greater to about 200% greater, about 100% greater to about 180% greater, about 100% greater to about 160% greater, about 100% greater to about 140% greater, about 100% greater to about 120% greater, about 120% greater to about 10,000% greater, about 120% greater to about 9,000% greater, about 120% greater to about 8,000% greater, about 120% greater to about 7,000% greater, about 120% greater to about 6,000% greater, about 120% greater to about 5,000% greater, about 120% greater to about 4,000% greater, about 120% greater to about 3,000% greater, about 120% greater to about 2,000% greater, about 120% greater to about 1,000% greater, about 120% greater to about 500% greater, about 120% greater to about 480% greater, about 120% greater to about 460% greater, about 120% greater to about 440% greater, about 120% greater to about 420% greater, about 120% greater to about 400% greater, about 120% greater to about 380% greater, about 120% greater to about 360% greater, about 120% greater to about 340% greater, about 120% greater to about 320% greater, about 120% greater to about 300% greater, about 120% greater to about 280% greater, about 120% greater to about 260% greater, about 120% greater to about 240% greater, about 120% greater to about 220% greater, about 120% greater to about 200% greater, about 120% greater to about 180% greater, about 120% greater to about 160% greater, about 120% greater to about 140% greater, about 140% greater to about 10,000% greater, about 140% greater to about 9,000% greater, about 140% greater to about 8,000% greater, about 140% greater to about 7,000% greater, about 140% greater to about 6,000% greater, about 140% greater to about 5,000% greater, about 140% greater to about 4,000% greater, about 140% greater to about 3,000% greater, about 140% greater to about 2,000% greater, about 140% greater to about 1,000% greater, about 140% greater to about 500% greater, about 140% greater to about 480% greater, about 140% greater to about 460% greater, about 140% greater to about 440% greater, about 140% greater to about 420% greater, about 140% greater to about 400% greater, about 140% greater to about 380% greater, about 140% greater to about 360% greater, about 140% greater to about 340% greater, about 140% greater to about 320% greater, about 140% greater to about 300% greater, about 140% greater to about 280% greater, about 140% greater to about 260% greater, about 140% greater to about 240% greater, about 140% greater to about 220% greater, about 140% greater to about 200% greater, about 140% greater to about 180% greater, about 140% greater to about 160% greater, about 160% greater to about 10,000% greater, about 160% greater to about 9,000% greater, about 160% greater to about 8,000% greater, about 160% greater to about 7,000% greater, about 160% greater to about 6,000% greater, about 160% greater to about 5,000% greater, about 160% greater to about 4,000% greater, about 160% greater to about 3,000% greater, about 160% greater to about 2,000% greater, about 160% greater to about 1,000% greater, about 160% greater to about 500% greater, about 160% greater to about 480% greater, about 160% greater to about 460% greater, about 160% greater to about 440% greater, about 160% greater to about 420% greater, about 160% greater to about 400% greater, about 160% greater to about 380% greater, about 160% greater to about 360% greater, about 160% greater to about 340% greater, about 160% greater to about 320% greater, about 160% greater to about 300% greater, about 160% greater to about 280% greater, about 160% greater to about 260% greater, about 160% greater to about 240% greater, about 160% greater to about 220% greater, about 160% greater to about 200% greater, about 160% greater to about 180% greater, about 180% greater to about 10,000% greater, about 180% greater to about 9,000% greater, about 180% greater to about 8,000% greater, about 180% greater to about 7,000% greater, about 180% greater to about 6,000% greater, about 180% greater to about 5,000% greater, about 180% greater to about 4,000% greater, about 180% greater to about 3,000% greater, about 180% greater to about 2,000% greater, about 180% greater to about 1,000% greater, about 180% greater to about 500% greater, about 180% greater to about 480% greater, about 180% greater to about 460% greater, about 180% greater to about 440% greater, about 180% greater to about 420% greater, about 180% greater to about 400% greater, about 180% greater to about 380% greater, about 180% greater to about 360% greater, about 180% greater to about 340% greater, about 180% greater to about 320% greater, about 180% greater to about 300% greater, about 180% greater to about 280% greater, about 180% greater to about 260% greater, about 180% greater to about 240% greater, about 180% greater to about 220% greater, about 180% greater to about 200% greater, about 200% greater to about 10,000% greater, about 200% greater to about 9,000% greater, about 200% greater to about 8,000% greater, about 200% greater to about 7,000% greater, about 200% greater to about 6,000% greater, about 200% greater to about 5,000% greater, about 200% greater to about 4,000% greater, about 200% greater to about 3,000% greater, about 200% greater to about 2,000% greater, about 200% greater to about 1,000% greater, about 200% greater to about 500% greater, about 200% greater to about 480% greater, about 200% greater to about 460% greater, about 200% greater to about 440% greater, about 200% greater to about 420% greater, about 200% greater to about 400% greater, about 200% greater to about 380% greater, about 200% greater to about 360% greater, about 200% greater to about 340% greater, about 200% greater to about 320% greater, about 200% greater to about 300% greater, about 200% greater to about 280% greater, about 200% greater to about 260% greater, about 200% greater to about 240% greater, about 200% greater to about 220% greater, about 220% greater to about 10,000% greater, about 220% greater to about 9,000% greater, about 220% greater to about 8,000% greater, about 220% greater to about 7,000% greater, about 220% greater to about 6,000% greater, about 220% greater to about 5,000% greater, about 220% greater to about 4,000% greater, about 220% greater to about 3,000% greater, about 220% greater to about 2,000% greater, about 220% greater to about 1,000% greater, about 220% greater to about 500% greater, about 220% greater to about 480% greater, about 220% greater to about 460% greater, about 220% greater to about 440% greater, about 220% greater to about 420% greater, about 220% greater to about 400% greater, about 220% greater to about 380% greater, about 220% greater to about 360% greater, about 220% greater to about 340% greater, about 220% greater to about 320% greater, about 220% greater to about 300% greater, about 220% greater to about 280% greater, about 220% greater to about 260% greater, about 220% greater to about 240% greater, about 240% greater to about 10,000% greater, about 240% greater to about 9,000% greater, about 240% greater to about 8,000% greater, about 240% greater to about 7,000% greater, about 240% greater to about 6,000% greater, about 240% greater to about 5,000% greater, about 240% greater to about 4,000% greater, about 240% greater to about 3,000% greater, about 240% greater to about 2,000% greater, about 240% greater to about 1,000% greater, about 240% greater to about 500% greater, about 240% greater to about 480% greater, about 240% greater to about 460% greater, about 240% greater to about 440% greater, about 240% greater to about 420% greater, about 240% greater to about 400% greater, about 240% greater to about 380% greater, about 240% greater to about 360% greater, about 240% greater to about 340% greater, about 240% greater to about 320% greater, about 240% greater to about 300% greater, about 240% greater to about 280% greater, about 240% greater to about 260% greater, about 260% greater to about 10,000% greater, about 260% greater to about 9,000% greater, about 260% greater to about 8,000% greater, about 260% greater to about 7,000% greater, about 260% greater to about 6,000% greater, about 260% greater to about 5,000% greater, about 260% greater to about 4,000% greater, about 260% greater to about 3,000% greater, about 260% greater to about 2,000% greater, about 260% greater to about 1,000% greater, about 260% greater to about 500% greater, about 260% greater to about 480% greater, about 260% greater to about 460% greater, about 260% greater to about 440% greater, about 260% greater to about 420% greater, about 260% greater to about 400% greater, about 260% greater to about 380% greater, about 260% greater to about 360% greater, about 260% greater to about 340% greater, about 260% greater to about 320% greater, about 260% greater to about 300% greater, about 260% greater to about 280% greater, about 280% greater to about 10,000% greater, about 280% greater to about 9,000% greater, about 280% greater to about 8,000% greater, about 280% greater to about 7,000% greater, about 280% greater to about 6,000% greater, about 280% greater to about 5,000% greater, about 280% greater to about 4,000% greater, about 280% greater to about 3,000% greater, about 280% greater to about 2,000% greater, about 280% greater to about 1,000% greater, about 280% greater to about 500% greater, about 280% greater to about 480% greater, about 280% greater to about 460% greater, about 280% greater to about 440% greater, about 280% greater to about 420% greater, about 280% greater to about 400% greater, about 280% greater to about 380% greater, about 280% greater to about 360% greater, about 280% greater to about 340% greater, about 280% greater to about 320% greater, about 280% greater to about 300% greater, about 300% greater to about 10,000% greater, about 300% greater to about 9,000% greater, about 300% greater to about 8,000% greater, about 300% greater to about 7,000% greater, about 300% greater to about 6,000% greater, about 300% greater to about 5,000% greater, about 300% greater to about 4,000% greater, about 300% greater to about 3,000% greater, about 300% greater to about 2,000% greater, about 300% greater to about 1,000% greater, about 300% greater to about 500% greater, about 300% greater to about 480% greater, about 300% greater to about 460% greater, about 300% greater to about 440% greater, about 300% greater to about 420% greater, about 300% greater to about 400% greater, about 300% greater to about 380% greater, about 300% greater to about 360% greater, about 300% greater to about 340% greater, about 300% greater to about 320% greater, about 320% greater to about 10,000% greater, about 320% greater to about 9,000% greater, about 320% greater to about 8,000% greater, about 320% greater to about 7,000% greater, about 320% greater to about 6,000% greater, about 320% greater to about 5,000% greater, about 320% greater to about 4,000% greater, about 320% greater to about 3,000% greater, about 320% greater to about 2,000% greater, about 320% greater to about 1,000% greater, about 320% greater to about 500% greater, about 320% greater to about 480% greater, about 320% greater to about 460% greater, about 320% greater to about 440% greater, about 320% greater to about 420% greater, about 320% greater to about 400% greater, about 320% greater to about 380% greater, about 320% greater to about 360% greater, about 320% greater to about 340% greater, about 340% greater to about 10,000% greater, about 340% greater to about 9,000% greater, about 340% greater to about 8,000% greater, about 340% greater to about 7,000% greater, about 340% greater to about 6,000% greater, about 340% greater to about 5,000% greater, about 340% greater to about 4,000% greater, about 340% greater to about 3,000% greater, about 340% greater to about 2,000% greater, about 340% greater to about 1,000% greater, about 340% greater to about 500% greater, about 340% greater to about 480% greater, about 340% greater to about 460% greater, about 340% greater to about 440% greater, about 340% greater to about 420% greater, about 340% greater to about 400% greater, about 340% greater to about 380% greater, about 340% greater to about 360% greater, about 360% greater to about 10,000% greater, about 360% greater to about 9,000% greater, about 360% greater to about 8,000% greater, about 360% greater to about 7,000% greater, about 360% greater to about 6,000% greater, about 360% greater to about 5,000% greater, about 360% greater to about 4,000% greater, about 360% greater to about 3,000% greater, about 360% greater to about 2,000% greater, about 360% greater to about 1,000% greater, about 360% greater to about 500% greater, about 360% greater to about 480% greater, about 360% greater to about 460% greater, about 360% greater to about 440% greater, about 360% greater to about 420% greater, about 360% greater to about 400% greater, about 360% greater to about 380% greater, about 380% greater to about 10,000% greater, about 380% greater to about 9,000% greater, about 380% greater to about 8,000% greater, about 380% greater to about 7,000% greater, about 380% greater to about 6,000% greater, about 380% greater to about 5,000% greater, about 380% greater to about 4,000% greater, about 380% greater to about 3,000% greater, about 380% greater to about 2,000% greater, about 380% greater to about 1,000% greater, about 380% greater to about 500% greater, about 380% greater to about 480% greater, about 380% greater to about 460% greater, about 380% greater to about 440% greater, about 380% greater to about 420% greater, about 380% greater to about 400% greater, about 400% greater to about 10,000% greater, about 400% greater to about 9,000% greater, about 400% greater to about 8,000% greater, about 400% greater to about 7,000% greater, about 400% greater to about 6,000% greater, about 400% greater to about 5,000% greater, about 400% greater to about 4,000% greater, about 400% greater to about 3,000% greater, about 400% greater to about 2,000% greater, about 400% greater to about 1,000% greater, about 400% greater to about 500% greater, about 400% greater to about 480% greater, about 400% greater to about 460% greater, about 400% greater to about 440% greater, about 400% greater to about 420% greater, about 420% greater to about 10,000% greater, about 420% greater to about 9,000% greater, about 420% greater to about 8,000% greater, about 420% greater to about 7,000% greater, about 420% greater to about 6,000% greater, about 420% greater to about 5,000% greater, about 420% greater to about 4,000% greater, about 420% greater to about 3,000% greater, about 420% greater to about 2,000% greater, about 420% greater to about 1,000% greater, about 420% greater to about 500% greater, about 420% greater to about 480% greater, about 420% greater to about 460% greater, about 420% greater to about 440% greater, about 440% greater to about 10,000% greater, about 440% greater to about 9,000% greater, about 440% greater to about 8,000% greater, about 440% greater to about 7,000% greater, about 440% greater to about 6,000% greater, about 440% greater to about 5,000% greater, about 440% greater to about 4,000% greater, about 440% greater to about 3,000% greater, about 440% greater to about 2,000% greater, about 440% greater to about 1,000% greater, about 440% greater to about 500% greater, about 440% greater to about 480% greater, about 440% greater to about 460% greater, about 460% greater to about 10,000% greater, about 460% greater to about 9,000% greater, about 460% greater to about 8,000% greater, about 460% greater to about 7,000% greater, about 460% greater to about 6,000% greater, about 460% greater to about 5,000% greater, about 460% greater to about 4,000% greater, about 460% greater to about 3,000% greater, about 460% greater to about 2,000% greater, about 460% greater to about 1,000% greater, about 460% greater to about 500% greater, about 460% greater to about 480% greater, about 480% greater to about 10,000% greater, about 480% greater to about 9,000% greater, about 480% greater to about 8,000% greater, about 480% greater to about 7,000% greater, about 480% greater to about 6,000% greater, about 480% greater to about 5,000% greater, about 480% greater to about 4,000% greater, about 480% greater to about 3,000% greater, about 480% greater to about 2,000% greater, about 480% greater to about 1,000% greater, about 480% greater to about 500% greater, about 500% greater to about 10,000% greater, about 500% greater to about 9,000% greater, about 500% greater to about 8,000% greater, about 500% greater to about 7,000% greater, about 500% greater to about 6,000% greater, about 500% greater to about 5,000% greater, about 500% greater to about 4,000% greater, about 500% greater to about 3,000% greater, about 500% greater to about 2,000% greater, about 500% greater to about 1,000% greater, about 1,000% greater to about 10,000% greater, about 1,000% greater to about 9,000% greater, about 1,000% greater to about 8,000% greater, about 1,000% greater to about 7,000% greater, about 1,000% greater to about 6,000% greater, about 1,000% greater to about 5,000% greater, about 1,000% greater to about 4,000% greater, about 1,000% greater to about 3,000% greater, about 1,000% greater to about 2,000% greater, about 2,000% greater to about 10,000% greater, about 2,000% greater to about 9,000% greater, about 2,000% greater to about 8,000% greater, about 2,000% greater to about 7,000% greater, about 2,000% greater to about 6,000% greater, about 2,000% greater to about 5,000% greater, about 2,000% greater to about 4,000% greater, about 2,000% greater to about 3,000% greater, about 3,000% greater to about 10,000% greater, about 3,000% greater to about 9,000% greater, about 3,000% greater to about 8,000% greater, about 3,000% greater to about 7,000% greater, about 3,000% greater to about 6,000% greater, about 3,000% greater to about 5,000% greater, about 3,000% greater to about 4,000% greater, about 4,000% greater to about 10,000% greater, about 4,000% greater to about 9,000% greater, about 4,000% greater to about 8,000% greater, about 4,000% greater to about 7,000% greater, about 4,000% greater to about 6,000% greater, about 4,000% greater to about 5,000% greater, about 5,000% greater to about 10,000% greater, about 5,000% greater to about 9,000% greater, about 5,000% greater to about 8,000% greater, about 5,000% greater to about 7,000% greater, about 5,000% greater to about 6,000% greater, about 6,000% greater to about 10,000% greater, about 6,000% greater to about 9,000% greater, about 6,000% greater to about 8,000% greater, about 6,000% greater to about 7,000% greater, about 7,000% greater to about 10,000% greater, about 7,000% greater to about 9,000% greater, about 7,000% greater to about 8,000% greater, about 8,000% greater to about 10,000% greater, about 8,000% greater to about 9,000% greater, or about 9,000% greater to about 10,000% greater) than the K_{D} at a pH of about 7.0 to about 8.0 (e.g., any of the subranges of this range described herein).

[0590] In some embodiments of any of the antigen-binding protein constructs (ABPCs) described herein, the dissociation rate of the first antigen-binding domain (and optionally the second antigen-binding domain, if present) at a pH of about 4.0 to about 6.5 (e.g., any of the subranges of this range described herein) is faster (e.g., at least 0.2-fold faster, at least 0.3-fold, at least 0.4-fold, at least 0.5-fold, at least 0.6-fold, at least 0.7-fold, at least 0.8-fold, at least 0.9-fold, at least 1.0-fold, at least 1.5-fold, at least 2.0-fold, at least 2.5-fold, at least 3.0 fold, at least 3.5-fold, at least 4.0-fold, at least 4.5-fold, at least 5.0-fold, at least 5.5-fold, at least 6.0-fold, at least 6.5-fold, at least 7.0-fold, at least 7.5-fold, at least 8.0-fold, at least 8.5-fold, at least 9.0-fold, at least 9.5-fold, at least 10.0-fold, at least 10.5-fold, at least 11.0-fold, at least 11.5-fold, at least 12.0-fold, at least 12.5-fold, at least 13.0-fold, at least 13.5-fold, at least 14.0-fold, at least 14.5-fold, at least 15.0-fold, at least 15.5-fold, at least 16.0-fold, at least 16.5-fold, at least 17.0-fold, at least 17.5-fold, at least 18.0-fold, at least 18.5-fold, at least 19.0-fold, at least 19.5-fold, at least 20-fold, at least 25-fold, at least 30-fold, at least 35-fold, at least 40-fold, at least 45-fold, at least 50-fold, at least 55-fold, at least 60-fold, at least 65-fold, at least 70-fold, at least 75-fold, at least 80-fold, at least 85-fold, at least 90-fold, at least 95-fold, or at least 100-fold faster or about 0.2-fold to about 100-fold faster, about 0.2-fold to about 90-fold faster, about 0.2-fold to about 80-fold faster, about 0.2-fold to about 70-fold faster, about 0.2-fold to about 60-fold faster, about 0.2-fold to about 50-fold faster, about 0.2-fold to about 40-fold faster, about 0.2-fold to about 30-fold faster, about 0.2-fold to about 20-fold faster, about 0.2-fold to about 15-fold faster, about 0.2-fold to about 10-fold faster, about 0.2-fold to about 5-fold, about 0.2-fold to about 2-fold faster, about 0.2-fold to about 1-fold faster, about 0.2-fold to about 0.5-fold faster, about 0.5-fold to about 100-fold faster, about 0.5-fold to about 90-fold faster, about 0.5-fold to about 80-fold faster, about 0.5-fold to about 70-fold faster, about 0.5-fold to about 60-fold faster, about 0.5-fold to about 50-fold faster, about 0.5-fold to about 40-fold faster, about 0.5-fold to about 30-fold faster, about 0.5-fold to about 20-fold faster, about 0.5-fold to about 15-fold faster, about 0.5-fold to about 10-fold faster, about 0.5-fold to about 5-fold, about 0.5-fold to about 2-fold faster, about 0.5-fold to about 1-fold faster, about 1-fold to about 100-fold faster, about 1-fold to about 90-fold faster, about 1-fold to about 80-fold faster, about 1-fold to about 70-fold faster, about 1-fold to about 60-fold faster, about 1-fold to about 50-fold faster, about 1-fold to about 40-fold faster, about 1-fold to about 30-fold faster, about 1-fold to about 20-fold faster, about 1-fold to about 15-fold faster, about 1-fold to about 10-fold faster, about 1-fold to about 5-fold, about 1-fold to about 2-fold faster, about 2-fold to about 100-fold faster, about 2-fold to about 90-fold faster, about 2-fold to about 80-fold faster, about 2-fold to about 70-fold faster, about 2-fold to about 60-fold faster, about 2-fold to about 50-fold faster, about 2-fold to about 40-fold faster, about 2-fold to about 30-fold faster, about 2-fold to about 20-fold faster, about 2-fold to about 15-fold faster, about 2-fold to about 10-fold faster, about 2-fold to about 5-fold, about 5-fold to about 100-fold faster, about 5-fold to about 90-fold faster, about 5-fold to about 80-fold faster, about 5-fold to about 70-fold faster, about 5-fold to about 60-fold faster, about 5-fold to about 50-fold faster, about 5-fold to about 40-fold faster, about 5-fold to about 30-fold faster, about 5-fold to about 20-fold faster, about 5-fold to about 15-fold faster, about 5-fold to about 10-fold faster, about 10-fold to about 100-fold faster, about 10-fold to about 90-fold faster, about 10-fold to about 80-fold faster, about 10-fold to about 70-fold faster, about 10-fold to about 60-fold faster, about 10-fold to about 50-fold faster, about 10-fold to about 40-fold faster, about 10-fold to about 30-fold faster, about 10-fold to about 20-fold faster, about 10-fold to about 15-fold faster, about 15-fold to about 100-fold faster, about 15-fold to about 90-fold faster, about 15-fold to about 80-fold faster, about 15-fold to about 70-fold faster, about 15-fold to about 60-fold faster, about 15-fold to about 50-fold faster, about 15-fold to about 40-fold faster, about 15-fold to about 30-fold faster, about 15-fold to about 20-fold faster, about 20-fold to about 100-fold faster, about 20-fold to about 90-fold faster, about 20-fold to about 80-fold faster, about 20-fold to about 70-fold faster, about 20-fold to about 60-fold faster, about 20-fold to about 50-fold faster, about 20-fold to about 40-fold faster, about 20-fold to about 30-fold faster, about 30-fold to about 100-fold faster, about 30-fold to about 90-fold faster, about 30-fold to about 80-fold faster, about 30-fold to about 70-fold faster, about 30-fold to about 60-fold faster, about 30-fold to about 50-fold faster, about 30-fold to about 40-fold faster, about 40-fold to about 100-fold faster, about 40-fold to about 90-fold faster, about 40-fold to about 80-fold faster, about 40-fold to about 70-fold faster, about 40-fold to about 60-fold faster, about 40-fold to about 50-fold faster, about 50-fold to about 100-fold faster, about 50-fold to about 90-fold faster, about 50-fold to about 80-fold faster, about 50-fold to about 70-fold faster, about 50-fold to about 60-fold faster, about 60-fold to about 100-fold faster, about 60-fold to about 90-fold faster, about 60-fold to about 80-fold faster, about 60-fold to about 70-fold faster, about 70-fold to about 100-fold faster, about 70-fold to about 90-fold faster, about 70-fold to about 80-fold faster, about 80-fold to about 100-fold faster, about 80-fold to about 90-fold faster, or about 90-fold to about 100-fold faster) than the dissociation rate at a pH of about 7.0 to about 8.0 (e.g., or any of the subranges of this range described herein).

[0591] In some embodiments of any of the antigen-binding protein constructs (ABPCs) described herein, the dissociation constant (K_{D}) of the first antigen-binding domain (and optionally the second antigen-binding domain, if present) at a pH of about 4.0 to about 6.5 (e.g., any of the subranges of this range described herein) is greater (e.g., detectably greater) (e.g., at least 0.2-fold greater, at least 0.3-fold, at least 0.4-fold, at least 0.5-fold, at least 0.6-fold, at least 0.7-fold, at least 0.8-fold, at least 0.9-fold, at least 1.0-fold, at least 1.5-fold, at least 2.0-fold, at least 2.5-fold, at least 3.0 fold, at least 3.5-fold, at least 4.0-fold, at least 4.5-fold, at least 5.0-fold, at least 5.5-fold, at least 6.0-fold, at least 6.5-fold, at least 7.0-fold, at least 7.5-fold, at least 8.0-fold, at least 8.5-fold, at least 9.0-fold, at least 9.5-fold, at least 10.0-fold, at least 10.5-fold, at least 11.0-fold, at least 11.5-fold, at least 12.0-fold, at least 12.5-fold, at least 13.0-fold, at least 13.5-fold, at least 14.0-fold, at least 14.5-fold, at least 15.0-fold, at least 15.5-fold, at least 16.0-fold, at least 16.5-fold, at least 17.0-fold, at least 17.5-fold, at least 18.0-fold, at least 18.5-fold, at least 19.0-fold, at least 19.5-fold, at least 20-fold greater, at least 25-fold greater, at least 30-fold greater, at least 35-fold greater, at least 40-fold greater, at least 45-fold greater, at least 50-fold greater, at least 55-fold greater, at least 60-fold greater, at least 65-fold greater, at least 70-fold greater, at least 75-fold greater, at least 80-fold greater, at least 85-fold greater, at least 90-fold greater, at least 95-fold greater, or at least 100-fold greater, or about 0.2-fold to about 100-fold greater, about 0.2-fold to about 90-fold greater, about 0.2-fold to about 80-fold greater, about 0.2-fold to about 70-fold greater, about 0.2-fold to about 60-fold greater, about 0.2-fold to about 50-fold greater, about 0.2-fold to about 40-fold greater, about 0.2-fold to about 30-fold greater, about 0.2-fold to about 25-fold greater, about 0.2-fold to about 20-fold greater, about 0.2-fold to about 15-fold greater, about 0.2-fold to about 10-fold greater, about 0.2-fold to about 8-fold greater, about 0.2-fold to about 5-fold greater, about 0.2-fold to about 2-fold greater, about 0.2-fold to about 1-fold greater, about 0.2-fold to about 0.5-fold greater, about 0.5-fold to about 100-fold greater, about 0.5-fold to about 90-fold greater, about 0.5-fold to about 80-fold greater, about 0.5-fold to about 70-fold greater, about 0.5-fold to about 60-fold greater, about 0.5-fold to about 50-fold greater, about 0.5-fold to about 40-fold greater, about 0.5-fold to about 30-fold greater, about 0.5-fold to about 25-fold greater, about 0.5-fold to about 20-fold greater, about 0.5-fold to about 15-fold greater, about 0.5-fold to about 10-fold greater, about 0.5-fold to about 8-fold greater, about 0.5-fold to about 5-fold greater, about 0.5-fold to about 2-fold greater, about 0.5-fold to about 1-fold greater, about 1-fold to about 100-fold greater, about 1-fold to about 90-fold greater, about 1-fold to about 80-fold greater, about 1-fold to about 70-fold greater, about 1-fold to about 60-fold greater, about 1-fold to about 50-fold greater, about 1-fold to about 40-fold greater, about 1-fold to about 30-fold greater, about 1-fold to about 25-fold greater, about 1-fold to about 20-fold greater, about 1-fold to about 15-fold greater, about 1-fold to about 10-fold greater, about 1-fold to about 8-fold greater, about 1-fold to about 5-fold greater, about 1-fold to about 2-fold greater, about 2-fold to about 100-fold greater, about 2-fold to about 90-fold greater, about 2-fold to about 80-fold greater, about 2-fold to about 70-fold greater, about 2-fold to about 60-fold greater, about 2-fold to about 50-fold greater, about 2-fold to about 40-fold greater, about 2-fold to about 30-fold greater, about 2-fold to about 25-fold greater, about 2-fold to about 20-fold greater, about 2-fold to about 15-fold greater, about 2-fold to about 10-fold greater, about 2-fold to about 8-fold greater, about 2-fold to about 5-fold greater, about 5-fold to about 100-fold greater, about 5-fold to about 90-fold greater, about 5-fold to about 80-fold greater, about 5-fold to about 70-fold greater, about 5-fold to about 60-fold greater, about 5-fold to about 50-fold greater, about 5-fold to about 40-fold greater, about 5-fold to about 30-fold greater, about 5-fold to about 25-fold greater, about 5-fold to about 20-fold greater, about 5-fold to about 15-fold greater, about 5-fold to about 10-fold greater, about 5-fold to about 8-fold greater, about 8-fold to about 100-fold greater, about 8-fold to about 90-fold greater, about 8-fold to about 80-fold greater, about 8-fold to about 70-fold greater, about 8-fold to about 60-fold greater, about 8-fold to about 50-fold greater, about 8-fold to about 40-fold greater, about 8-fold to about 30-fold greater, about 8-fold to about 25-fold greater, about 8-fold to about 20-fold greater, about 8-fold to about 15-fold greater, about 8-fold to about 10-fold greater, about 10-fold to about 100-fold greater, about 10-fold to about 90-fold greater, about 10-fold to about 80-fold greater, about 10-fold to about 70-fold greater, about 10-fold to about 60-fold greater, about 10-fold to about 50-fold greater, about 10-fold to about 40-fold greater, about 10-fold to about 30-fold greater, about 10-fold to about 25-fold greater, about 10-fold to about 20-fold greater, about 10-fold to about 15-fold greater, about 15-fold to about 100-fold greater, about 15-fold to about 90-fold greater, about 15-fold to about 80-fold greater, about 15-fold to about 70-fold greater, about 15-fold to about 60-fold greater, about 15-fold to about 50-fold greater, about 15-fold to about 40-fold greater, about 15-fold to about 30-fold greater, about 15-fold to about 25-fold greater, about 15-fold to about 20-fold greater, about 20-fold to about 100-fold greater, about 20-fold to about 90-fold greater, about 20-fold to about 80-fold greater, about 20-fold to about 70-fold greater, about 20-fold to about 60-fold greater, about 20-fold to about 50-fold greater, about 20-fold to about 40-fold greater, about 20-fold to about 30-fold greater, about 20-fold to about 25-fold greater, about 25-fold to about 100-fold greater, about 25-fold to about 90-fold greater, about 25-fold to about 80-fold greater, about 25-fold to about 70-fold greater, about 25-fold to about 60-fold greater, about 25-fold to about 50-fold greater, about 25-fold to about 40-fold greater, about 25-fold to about 30-fold greater, about 30-fold to about 100-fold greater, about 30-fold to about 90-fold greater, about 30-fold to about 80-fold greater, about 30-fold to about 70-fold greater, about 30-fold to about 60-fold greater, about 30-fold to about 50-fold greater, about 30-fold to about 40-fold greater, about 40-fold to about 100-fold greater, about 40-fold to about 90-fold greater, about 40-fold to about 80-fold greater, about 40-fold to about 70-fold greater, about 40-fold to about 60-fold greater, about 40-fold to about 50-fold greater, about 50-fold to about 100-fold greater, about 50-fold to about 90-fold greater, about 50-fold to about 80-fold greater, about 50-fold to about 70-fold greater, about 50-fold to about 60-fold greater, about 60-fold to about 100-fold greater, about 60-fold to about 90-fold greater, about 60-fold to about 80-fold greater, about 60-fold to about 70-fold greater, about 70-fold to about 100-fold greater, about 70-fold to about 90-fold greater, about 70-fold to about 80-fold greater, about 80-fold to about 100-fold greater, about 80-fold to about 90-fold greater, or about 90-fold to about 100-fold greater), than the K_{D} at a pH of about 7.0 to about 8.0 (e.g., any of the subranges of this range described herein).

[0592] In some embodiments of the ABPCs that include a first antigen-binding domain and a second antigen-binding domain, the first and second antigen-binding domains are identical or are at least 80% identical (e.g., at least 82%, at least 84%, at least 86%, at least 88%, at least 90%, at least 91%, at least 92%, at least 93%, at least 94%, at least 95%, at least 96%, at least 97%, at least 98%, or at least 99% identical) in amino acid sequence to each other. In some embodiments, the ABPCs that include a first antigen-binding domain and a second antigen-binding domain, the first antigen-binding domain and the second antigen-binding domain have a sequence that is less than 80% identical (e.g., less than 75% identical, less than 70% identical, less than 65% identical, less than 60% identical, less than 55% identical, less than 50% identical, less than 45% identical, less than 40% identical, less than 35% identical, less than 30% identical, less than 25% identical, less than 20% identical, less than 15% identical, less than 10% identical, or less than 5% identical) to each other. In some embodiments of ABPCs that include a first and a second antigen-binding domain, the first and second antigen-binding domain binds two different epitopes (e.g., two different epitopes on CD22 or the first antigen-binding domain binding specifically to CD22 and the second antigen-binding domain binding to an antigen other than CD22).

[0593] In some embodiments of any of the ABPCs described herein, the K_{D} of the first antigen-binding domain (and optionally, the second antigen-binding domain if present) at a pH of about 7.0 to about 8.0 (e.g., any of the subranges of this range described herein) is between about 1 pM to about 5 μM (e.g., about 1 pM to about 2 μM, about 1 pM to about 1 μM, about 1 pM to about 500 nM, about 1 pM to about 250 nM, about 1 pM to about 240 nM, about 1 pM to about 230 nM, about 1 pM to about 220 nM, about 1 pM to about 210 nM, about 1 pM to about 200 nM, about 1 pM to about 190 nM, about 1 pM to about 180 nM, about 1 pM to about 170 nM, about 1 pM to about 160 nM, about 1 pM to about 150 nM, about 1 pM to about 140 nM, about 1 pM to about 130 nM, about 1 pM to about 120 nM, about 1 pM to about 110 nM, about 1 pM to about 100 nM, about 1 pM to about 95 nM, about 1 pM to about 90 nM, about 1 pM to about 85 nM, about 1 pM to about 80 nM, about 1 pM to about 75 nM, about 1 pM to about 70 nM, about 1 pM to about 65 nM, about 1 pM to about 60 nM, about 1 pM to about 55 nM, about 1 pM to about 50 nM, about 1 pM to about 45 nM, about 1 pM to about 40 nM, about 1 pM to about 35 nM, about 1 pM to about 30 nM, about 1 pM to about 25 nM, about 1 pM to about 20 nM, about 1 pM to about 15 nM, about 1 pM to about 10 nM, about 1 pM to about 5 nM, about 1 pM to about 2 nM, about 1 pM to about 1 nM, about 1 pM to about 950 pM, about 1 pM to about 900 pM, about 1 pM to about 850 pM, about 1 pM to about 800 pM, about 1 pM to about 750 pM, about 1 pM to about 700 pM, about 1 pM to about 650 pM, about 1 pM to about 600 pM, about 1 pM to about 550 pM, about 1 pM to about 500 pM, about 1 pM to about 450 pM, about 1 pM to about 400 pM, about 1 pM to about 350 pM, about 1 pM to about 300 pM, about 1 pM to about 250 pM, about 1 pM to about 200 pM, about 1 pM to about 150 pM, about 1 pM to about 100 pM, about 1 pM to about 90 pM, about 1 pM to about 80 pM, about 1 pM to about 70 pM, about 1 pM to about 60 pM, about 1 pM to about 50 pM, about 1 pM to about 40 pM, about 1 pM to about 30 pM, about 1 pM to about 20 pM, about 1 pM to about 10 pM, about 1 pM to about 5 pM, about 1 pM to about 4 pM, about 1 pM to about 3 pM, about 1 pM to about 2 pM, about 2 pM to about 5 μM, about 2 pM to about 2 μM, about 2 pM to about 1 μM, about 2 pM to about 500 nM, about 2 pM to about 250 nM, about 2 pM to about 240 nM, about 2 pM to about 230 nM, about 2 pM to about 220 nM, about 2 pM to about 210 nM, about 2 pM to about 200 nM, about 2 pM to about 190 nM, about 2 pM to about 180 nM, about 2 pM to about 170 nM, about 2 pM to about 160 nM, about 2 pM to about 150 nM, about 2 pM to about 140 nM, about 2 pM to about 130 nM, about 2 pM to about 120 nM, about 2 pM to about 110 nM, about 2 pM to about 100 nM, about 2 pM to about 95 nM, about 2 pM to about 90 nM, about 2 pM to about 85 nM, about 2 pM to about 80 nM, about 2 pM to about 75 nM, about 2 pM to about 70 nM, about 2 pM to about 65 nM, about 2 pM to about 60 nM, about 2 pM to about 55 nM, about 2 pM to about 50 nM, about 2 pM to about 45 nM, about 2 pM to about 40 nM, about 2 pM to about 35 nM, about 2 pM to about 30 nM, about 2 pM to about 25 nM, about 2 pM to about 20 nM, about 2 pM to about 15 nM, about 2 pM to about 10 nM, about 2 pM to about 5 nM, about 2 pM to about 2 nM, about 2 pM to about 1 nM, about 2 pM to about 950 pM, about 2 pM to about 900 pM, about 2 pM to about 850 pM, about 2 pM to about 800 pM, about 2 pM to about 750 pM, about 2 pM to about 700 pM, about 2 pM to about 650 pM, about 2 pM to about 600 pM, about 2 pM to about 550 pM, about 2 pM to about 500 pM, about 2 pM to about 450 pM, about 2 pM to about 400 pM, about 2 pM to about 350 pM, about 2 pM to about 300 pM, about 2 pM to about 250 pM, about 2 pM to about 200 pM, about 2 pM to about 150 pM, about 2 pM to about 100 pM, about 2 pM to about 90 pM, about 2 pM to about 80 pM, about 2 pM to about 70 pM, about 2 pM to about 60 pM, about 2 pM to about 50 pM, about 2 pM to about 40 pM, about 2 pM to about 30 pM, about 2 pM to about 20 pM, about 2 pM to about 10 pM, about 2 pM to about 5 pM, about 2 pM to about 4 pM, about 2 pM to about 3 pM, about 5 pM to about 5 μM, about 5 pM to about 2 μM, about 5 pM to about 1 μM, about 5 pM to about 500 nM, about 5 pM to about 250 nM, about 5 pM to about 240 nM, about 5 pM to about 230 nM, about 5 pM to about 220 nM, about 5 pM to about 210 nM, about 5 pM to about 200 nM, about 5 pM to about 190 nM, about 5 pM to about 180 nM, about 5 pM to about 170 nM, about 5 pM to about 160 nM, about 5 pM to about 150 nM, about 5 pM to about 140 nM, about 5 pM to about 130 nM, about 5 pM to about 120 nM, about 5 pM to about 110 nM, about 5 pM to about 100 nM, about 5 pM to about 95 nM, about 5 pM to about 90 nM, about 5 pM to about 85 nM, about 5 pM to about 80 nM, about 5 pM to about 75 nM, about 5 pM to about 70 nM, about 5 pM to about 65 nM, about 5 pM to about 60 nM, about 5 pM to about 55 nM, about 5 pM to about 50 nM, about 5 pM to about 45 nM, about 5 pM to about 40 nM, about 5 pM to about 35 nM, about 5 pM to about 30 nM, about 5 pM to about 25 nM, about 5 pM to about 20 nM, about 5 pM to about 15 nM, about 5 pM to about 10 nM, about 5 pM to about 5 nM, about 5 pM to about 2 nM, about 5 pM to about 1 nM, about 5 pM to about 950 pM, about 5 pM to about 900 pM, about 5 pM to about 850 pM, about 5 pM to about 800 pM, about 5 pM to about 750 pM, about 5 pM to about 700 pM, about 5 pM to about 650 pM, about 5 pM to about 600 pM, about 5 pM to about 550 pM, about 5 pM to about 500 pM, about 5 pM to about 450 pM, about 5 pM to about 400 pM, about 5 pM to about 350 pM, about 5 pM to about 300 pM, about 5 pM to about 250 pM, about 5 pM to about 200 pM, about 5 pM to about 150 pM, about 5 pM to about 100 pM, about 5 pM to about 90 pM, about 5 pM to about 80 pM, about 5 pM to about 70 pM, about 5 pM to about 60 pM, about 5 pM to about 50 pM, about 5 pM to about 40 pM, about 5 pM to about 30 pM, about 5 pM to about 20 pM, about 5 pM to about 10 pM, about 10 pM to about 5 μM, about 10 pM to about 2 μM, about 10 pM to about 1 μM, about 10 pM to about 500 nM, about 10 pM to about 250 nM, about 10 pM to about 240 nM, about 10 pM to about 230 nM, about 10 pM to about 220 nM, about 10 pM to about 210 nM, about 10 pM to about 200 nM, about 10 pM to about 190 nM, about 10 pM to about 180 nM, about 10 pM to about 170 nM, about 10 pM to about 160 nM, about 10 pM to about 150 nM, about 10 pM to about 140 nM, about 10 pM to about 130 nM, about 10 pM to about 120 nM, about 10 pM to about 110 nM, about 10 pM to about 100 nM, about 10 pM to about 95 nM, about 10 pM to about 90 nM, about 10 pM to about 85 nM, about 10 pM to about 80 nM, about 10 pM to about 75 nM, about 10 pM to about 70 nM, about 10 pM to about 65 nM, about 10 pM to about 60 nM, about 10 pM to about 55 nM, about 10 pM to about 50 nM, about 10 pM to about 45 nM, about 10 pM to about 40 nM, about 10 pM to about 35 nM, about 10 pM to about 30 nM, about 10 pM to about 25 nM, about 10 pM to about 20 nM, about 10 pM to about 15 nM, about 10 pM to about 10 nM, about 10 pM to about 5 nM, about 10 pM to about 2 nM, about 10 pM to about 1 nM, about 10 pM to about 950 pM, about 10 pM to about 900 pM, about 10 pM to about 850 pM, about 10 pM to about 800 pM, about 10 pM to about 750 pM, about 10 pM to about 700 pM, about 10 pM to about 650 pM, about 10 pM to about 600 pM, about 10 pM to about 550 pM, about 10 pM to about 500 pM, about 10 pM to about 450 pM, about 10 pM to about 400 pM, about 10 pM to about 350 pM, about 10 pM to about 300 pM, about 10 pM to about 250 pM, about 10 pM to about 200 pM, about 10 pM to about 150 pM, about 10 pM to about 100 pM, about 10 pM to about 90 pM, about 10 pM to about 80 pM, about 10 pM to about 70 pM, about 10 pM to about 60 pM, about 10 pM to about 50 pM, about 10 pM to about 40 pM, about 10 pM to about 30 pM, about 10 pM to about 20 pM, about 15 pM to about 5 μM, about 15 pM to about 2 μM, about 15 pM to about 1 μM, about 15 pM to about 500 nM, about 15 pM to about 250 nM, about 15 pM to about 240 nM, about 15 pM to about 230 nM, about 15 pM to about 220 nM, about 15 pM to about 210 nM, about 15 pM to about 200 nM, about 15 pM to about 190 nM, about 15 pM to about 180 nM, about 15 pM to about 170 nM, about 15 pM to about 160 nM, about 15 pM to about 150 nM, about 15 pM to about 140 nM, about 15 pM to about 130 nM, about 15 pM to about 120 nM, about 15 pM to about 110 nM, about 15 pM to about 100 nM, about 15 pM to about 95 nM, about 15 pM to about 90 nM, about 15 pM to about 85 nM, about 15 pM to about 80 nM, about 15 pM to about 75 nM, about 15 pM to about 70 nM, about 15 pM to about 65 nM, about 15 pM to about 60 nM, about 15 pM to about 55 nM, about 15 pM to about 50 nM, about 15 pM to about 45 nM, about 15 pM to about 40 nM, about 15 pM to about 35 nM, about 15 pM to about 30 nM, about 15 pM to about 25 nM, about 15 pM to about 20 nM, about 15 pM to about 15 nM, about 15 pM to about 10 nM, about 15 pM to about 5 nM, about 15 pM to about 2 nM, about 15 pM to about 1 nM, about 15 pM to about 950 pM, about 15 pM to about 900 pM, about 15 pM to about 850 pM, about 15 pM to about 800 pM, about 15 pM to about 750 pM, about 15 pM to about 700 pM, about 15 pM to about 650 pM, about 15 pM to about 600 pM, about 15 pM to about 550 pM, about 15 pM to about 500 pM, about 15 pM to about 450 pM, about 15 pM to about 400 pM, about 15 pM to about 350 pM, about 15 pM to about 300 pM, about 15 pM to about 250 pM, about 15 pM to about 200 pM, about 15 pM to about 150 pM, about 15 pM to about 100 pM, about 15 pM to about 90 pM, about 15 pM to about 80 pM, about 15 pM to about 70 pM, about 15 pM to about 60 pM, about 15 pM to about 50 pM, about 15 pM to about 40 pM, about 15 pM to about 30 pM, about 15 pM to about 20 pM, about 20 pM to about 5 μM, about 20 pM to about 2 μM, about 20 pM to about 1 μM, about 20 pM to about 500 nM, about 20 pM to about 250 nM, about 20 pM to about 240 nM, about 20 pM to about 230 nM, about 20 pM to about 220 nM, about 20 pM to about 210 nM, about 20 pM to about 200 nM, about 20 pM to about 190 nM, about 20 pM to about 180 nM, about 20 pM to about 170 nM, about 20 pM to about 160 nM, about 20 pM to about 150 nM, about 20 pM to about 140 nM, about 20 pM to about 130 nM, about 20 pM to about 120 nM, about 20 pM to about 110 nM, about 20 pM to about 100 nM, about 20 pM to about 95 nM, about 20 pM to about 90 nM, about 20 pM to about 85 nM, about 20 pM to about 80 nM, about 20 pM to about 75 nM, about 20 pM to about 70 nM, about 20 pM to about 65 nM, about 20 pM to about 60 nM, about 20 pM to about 55 nM, about 20 pM to about 50 nM, about 20 pM to about 45 nM, about 20 pM to about 40 nM, about 20 pM to about 35 nM, about 20 pM to about 30 nM, about 20 pM to about 25 nM, about 20 pM to about 20 nM, about 20 pM to about 15 nM, about 20 pM to about 10 nM, about 20 pM to about 5 nM, about 20 pM to about 2 nM, about 20 pM to about 1 nM, about 20 pM to about 950 pM, about 20 pM to about 900 pM, about 20 pM to about 850 pM, about 20 pM to about 800 pM, about 20 pM to about 750 pM, about 20 pM to about 700 pM, about 20 pM to about 650 pM, about 20 pM to about 600 pM, about 20 pM to about 550 pM, about 20 pM to about 500 pM, about 20 pM to about 450 pM, about 20 pM to about 400 pM, about 20 pM to about 350 pM, about 20 pM to about 300 pM, about 20 pM to about 250 pM, about 20 pM to about 20 pM, about 200 pM to about 150 pM, about 20 pM to about 100 pM, about 20 pM to about 90 pM, about 20 pM to about 80 pM, about 20 pM to about 70 pM, about 20 pM to about 60 pM, about 20 pM to about 50 pM, about 20 pM to about 40 pM, about 20 pM to about 30 pM, about 30 pM to about 5 μM, about 30 pM to about 2 μM, about 30 pM to about 1 μM, about 30 pM to about 500 nM, about 30 pM to about 250 nM, about 30 pM to about 240 nM, about 30 pM to about 230 nM, about 30 pM to about 220 nM, about 30 pM to about 210 nM, about 30 pM to about 200 nM, about 30 pM to about 190 nM, about 30 pM to about 180 nM, about 30 pM to about 170 nM, about 30 pM to about 160 nM, about 30 pM to about 150 nM, about 30 pM to about 140 nM, about 30 pM to about 130 nM, about 30 pM to about 120 nM, about 30 pM to about 110 nM, about 30 pM to about 100 nM, about 30 pM to about 95 nM, about 30 pM to about 90 nM, about 30 pM to about 85 nM, about 30 pM to about 80 nM, about 30 pM to about 75 nM, about 30 pM to about 70 nM, about 30 pM to about 65 nM, about 30 pM to about 60 nM, about 30 pM to about 55 nM, about 30 pM to about 50 nM, about 30 pM to about 45 nM, about 30 pM to about 40 nM, about 30 pM to about 35 nM, about 30 pM to about 30 nM, about 30 pM to about 25 nM, about 30 pM to about 20 nM, about 30 pM to about 15 nM, about 30 pM to about 10 nM, about 30 pM to about 5 nM, about 30 pM to about 2 nM, about 30 pM to about 1 nM, about 30 pM to about 950 pM, about 30 pM to about 900 pM, about 30 pM to about 850 pM, about 30 pM to about 800 pM, about 30 pM to about 750 pM, about 30 pM to about 700 pM, about 30 pM to about 650 pM, about 30 pM to about 600 pM, about 30 pM to about 550 pM, about 30 pM to about 500 pM, about 30 pM to about 450 pM, about 30 pM to about 400 pM, about 30 pM to about 350 pM, about 30 pM to about 300 pM, about 30 pM to about 250 pM, about 30 pM to about 200 pM, about 30 pM to about 150 pM, about 30 pM to about 100 pM, about 30 pM to about 90 pM, about 30 pM to about 80 pM, about 30 pM to about 70 pM, about 30 pM to about 60 pM, about 30 pM to about 50 pM, about 30 pM to about 40 pM, about 40 pM to about 5 μM, about 40 pM to about 2 μM, about 40 pM to about 1 μM, about 40 pM to about 500 nM, about 40 pM to about 250 nM, about 40 pM to about 240 nM, about 40 pM to about 230 nM, about 40 pM to about 220 nM, about 40 pM to about 210 nM, about 40 pM to about 200 nM, about 40 pM to about 190 nM, about 40 pM to about 180 nM, about 40 pM to about 170 nM, about 40 pM to about 160 nM, about 40 pM to about 150 nM, about 40 pM to about 140 nM, about 40 pM to about 130 nM, about 40 pM to about 120 nM, about 40 pM to about 110 nM, about 40 pM to about 100 nM, about 40 pM to about 95 nM, about 40 pM to about 90 nM, about 40 pM to about 85 nM, about 40 pM to about 80 nM, about 40 pM to about 75 nM, about 40 pM to about 70 nM, about 40 pM to about 65 nM, about 40 pM to about 60 nM, about 40 pM to about 55 nM, about 40 pM to about 50 nM, about 40 pM to about 45 nM, about 40 pM to about 40 nM, about 40 pM to about 35 nM, about 40 pM to about 30 nM, about 40 pM to about 25 nM, about 40 pM to about 30 nM, about 40 pM to about 15 nM, about 40 pM to about 10 nM, about 40 pM to about 5 nM, about 40 pM to about 2 nM, about 40 pM to about 1 nM, about 40 pM to about 950 pM, about 40 pM to about 900 pM, about 40 pM to about 850 pM, about 40 pM to about 800 pM, about 40 pM to about 750 pM, about 40 pM to about 700 pM, about 40 pM to about 650 pM, about 40 pM to about 600 pM, about 40 pM to about 550 pM, about 40 pM to about 500 pM, about 40 pM to about 450 pM, about 40 pM to about 400 pM, about 40 pM to about 350 pM, about 40 pM to about 300 pM, about 40 pM to about 250 pM, about 40 pM to about 200 pM, about 40 pM to about 150 pM, about 40 pM to about 100 pM, about 40 pM to about 90 pM, about 40 pM to about 80 pM, about 40 pM to about 70 pM, about 40 pM to about 60 pM, about 40 pM to about 50 pM, about 50 pM to about 5 μM, about 50 pM to about 2 μM, about 50 pM to about 1 μM, about 50 pM to about 500 nM, about 50 pM to about 250 nM, about 50 pM to about 240 nM, about 50 pM to about 230 nM, about 50 pM to about 220 nM, about 50 pM to about 210 nM, about 50 pM to about 200 nM, about 50 pM to about 190 nM, about 50 pM to about 180 nM, about 50 pM to about 170 nM, about 50 pM to about 160 nM, about 50 pM to about 150 nM, about 50 pM to about 140 nM, about 50 pM to about 130 nM, about 50 pM to about 120 nM, about 50 pM to about 110 nM, about 50 pM to about 100 nM, about 50 pM to about 95 nM, about 50 pM to about 90 nM, about 50 pM to about 85 nM, about 50 pM to about 80 nM, about 50 pM to about 75 nM, about 50 pM to about 70 nM, about 50 pM to about 65 nM, about 50 pM to about 60 nM, about 50 pM to about 55 nM, about 50 pM to about 50 nM, about 50 pM to about 45 nM, about 50 pM to about 40 nM, about 50 pM to about 35 nM, about 50 pM to about 30 nM, about 50 pM to about 25 nM, about 50 pM to about 30 nM, about 50 pM to about 15 nM, about 50 pM to about 10 nM, about 50 pM to about 5 nM, about 50 pM to about 2 nM, about 50 pM to about 1 nM, about 50 pM to about 950 pM, about 50 pM to about 900 pM, about 50 pM to about 850 pM, about 50 pM to about 800 pM, about 50 pM to about 750 pM, about 50 pM to about 700 pM, about 50 pM to about 650 pM, about 50 pM to about 600 pM, about 50 pM to about 550 pM, about 50 pM to about 500 pM, about 50 pM to about 450 pM, about 50 pM to about 400 pM, about 50 pM to about 350 pM, about 50 pM to about 300 pM, about 50 pM to about 250 pM, about 50 pM to about 200 pM, about 50 pM to about 150 pM, about 50 pM to about 100 pM, about 50 pM to about 90 pM, about 50 pM to about 80 pM, about 50 pM to about 70 pM, about 50 pM to about 60 pM, about 60 pM to about 5 μM, about 60 pM to about 2 μM, about 60 pM to about 1 μM, about 60 pM to about 500 nM, about 60 pM to about 250 nM, about 60 pM to about 240 nM, about 60 pM to about 230 nM, about 60 pM to about 220 nM, about 60 pM to about 210 nM, about 60 pM to about 200 nM, about 60 pM to about 190 nM, about 60 pM to about 180 nM, about 60 pM to about 170 nM, about 60 pM to about 160 nM, about 60 pM to about 150 nM, about 60 pM to about 140 nM, about 60 pM to about 130 nM, about 60 pM to about 120 nM, about 60 pM to about 110 nM, about 60 pM to about 100 nM, about 60 pM to about 95 nM, about 60 pM to about 90 nM, about 60 pM to about 85 nM, about 60 pM to about 80 nM, about 60 pM to about 75 nM, about 60 pM to about 70 nM, about 60 pM to about 65 nM, about 60 pM to about 60 nM, about 60 pM to about 55 nM, about 60 pM to about 50 nM, about 60 pM to about 45 nM, about 60 pM to about 40 nM, about 60 pM to about 35 nM, about 60 pM to about 30 nM, about 60 pM to about 25 nM, about 60 pM to about 20 nM, about 60 pM to about 15 nM, about 60 pM to about 10 nM, about 60 pM to about 5 nM, about 60 pM to about 2 nM, about 60 pM to about 1 nM, about 60 pM to about 950 pM, about 60 pM to about 900 pM, about 60 pM to about 850 pM, about 60 pM to about 800 pM, about 60 pM to about 750 pM, about 60 pM to about 700 pM, about 60 pM to about 650 pM, about 60 pM to about 600 pM, about 60 pM to about 550 pM, about 60 pM to about 500 pM, about 60 pM to about 450 pM, about 60 pM to about 400 pM, about 60 pM to about 350 pM, about 60 pM to about 300 pM, about 60 pM to about 250 pM, about 60 pM to about 200 pM, about 60 pM to about 150 pM, about 60 pM to about 100 pM, about 60 pM to about 90 pM, about 60 pM to about 80 pM, about 60 pM to about 70 pM, about 70 pM to about 5 μM, about 70 pM to about 2 μM, about 70 pM to about 1 μM, about 70 pM to about 500 nM, about 70 pM to about 250 nM, about 70 pM to about 240 nM, about 70 pM to about 230 nM, about 70 pM to about 220 nM, about 70 pM to about 210 nM, about 70 pM to about 200 nM, about 70 pM to about 190 nM, about 70 pM to about 180 nM, about 70 pM to about 170 nM, about 70 pM to about 160 nM, about 70 pM to about 150 nM, about 70 pM to about 140 nM, about 70 pM to about 130 nM, about 70 pM to about 120 nM, about 70 pM to about 110 nM, about 70 pM to about 100 nM, about 70 pM to about 95 nM, about 70 pM to about 90 nM, about 70 pM to about 85 nM, about 70 pM to about 80 nM, about 70 pM to about 75 nM, about 70 pM to about 70 nM, about 70 pM to about 65 nM, about 70 pM to about 60 nM, about 70 pM to about 55 nM, about 70 pM to about 50 nM, about 70 pM to about 45 nM, about 70 pM to about 40 nM, about 70 pM to about 35 nM, about 70 pM to about 30 nM, about 70 pM to about 25 nM, about 70 pM to about 20 nM, about 70 pM to about 15 nM, about 70 pM to about 10 nM, about 70 pM to about 5 nM, about 70 pM to about 2 nM, about 70 pM to about 1 nM, about 70 pM to about 950 pM, about 70 pM to about 900 pM, about 70 pM to about 850 pM, about 70 pM to about 800 pM, about 70 pM to about 750 pM, about 70 pM to about 700 pM, about 70 pM to about 650 pM, about 70 pM to about 600 pM, about 70 pM to about 550 pM, about 70 pM to about 500 pM, about 70 pM to about 450 pM, about 70 pM to about 400 pM, about 70 pM to about 350 pM, about 70 pM to about 300 pM, about 70 pM to about 250 pM, about 70 pM to about 200 pM, about 70 pM to about 150 pM, about 70 pM to about 100 pM, about 70 pM to about 90 pM, about 70 pM to about 80 pM, about 80 pM to about 5 μM, about 80 pM to about 2 μM, about 80 pM to about 1 μM, about 80 pM to about 500 nM, about 80 pM to about 250 nM, about 80 pM to about 240 nM, about 80 pM to about 230 nM, about 80 pM to about 220 nM, about 80 pM to about 210 nM, about 80 pM to about 200 nM, about 80 pM to about 190 nM, about 80 pM to about 180 nM, about 80 pM to about 170 nM, about 80 pM to about 160 nM, about 80 pM to about 150 nM, about 80 pM to about 140 nM, about 80 pM to about 130 nM, about 80 pM to about 120 nM, about 80 pM to about 110 nM, about 80 pM to about 100 nM, about 80 pM to about 95 nM, about 80 pM to about 90 nM, about 80 pM to about 85 nM, about 80 pM to about 80 nM, about 80 pM to about 75 nM, about 80 pM to about 70 nM, about 80 pM to about 65 nM, about 80 pM to about 60 nM, about 80 pM to about 55 nM, about 80 pM to about 50 nM, about 80 pM to about 45 nM, about 80 pM to about 40 nM, about 80 pM to about 35 nM, about 80 pM to about 30 nM, about 80 pM to about 25 nM, about 80 pM to about 20 nM, about 80 pM to about 15 nM, about 80 pM to about 10 nM, about 80 pM to about 5 nM, about 80 pM to about 2 nM, about 80 pM to about 1 nM, about 80 pM to about 950 pM, about 80 pM to about 900 pM, about 80 pM to about 850 pM, about 80 pM to about 800 pM, about 80 pM to about 750 pM, about 80 pM to about 700 pM, about 80 pM to about 650 pM, about 80 pM to about 600 pM, about 80 pM to about 550 pM, about 80 pM to about 500 pM, about 80 pM to about 450 pM, about 80 pM to about 400 pM, about 80 pM to about 350 pM, about 80 pM to about 300 pM, about 80 pM to about 250 pM, about 80 pM to about 200 pM, about 80 pM to about 150 pM, about 80 pM to about 100 pM, about 80 pM to about 90 pM, about 90 pM to about 5 μM, about 90 pM to about 2 μM, about 90 pM to about 1 μM, about 90 pM to about 500 nM, about 90 pM to about 250 nM, about 90 pM to about 240 nM, about 90 pM to about 230 nM, about 90 pM to about 220 nM, about 90 pM to about 210 nM, about 90 pM to about 200 nM, about 90 pM to about 190 nM, about 90 pM to about 180 nM, about 90 pM to about 170 nM, about 90 pM to about 160 nM, about 90 pM to about 150 nM, about 90 pM to about 140 nM, about 90 pM to about 130 nM, about 90 pM to about 120 nM, about 90 pM to about 110 nM, about 90 pM to about 100 nM, about 90 pM to about 95 nM, about 90 pM to about 90 nM, about 90 pM to about 85 nM, about 90 pM to about 80 nM, about 90 pM to about 75 nM, about 90 pM to about 70 nM, about 90 pM to about 65 nM, about 90 pM to about 60 nM, about 90 pM to about 55 nM, about 90 pM to about 50 nM, about 90 pM to about 45 nM, about 90 pM to about 40 nM, about 90 pM to about 35 nM, about 90 pM to about 30 nM, about 90 pM to about 25 nM, about 90 pM to about 30 nM, about 90 pM to about 15 nM, about 90 pM to about 10 nM, about 90 pM to about 5 nM, about 90 pM to about 2 nM, about 90 pM to about 1 nM, about 90 pM to about 950 pM, about 90 pM to about 900 pM, about 90 pM to about 850 pM, about 90 pM to about 800 pM, about 90 pM to about 750 pM, about 90 pM to about 700 pM, about 90 pM to about 650 pM, about 90 pM to about 600 pM, about 90 pM to about 550 pM, about 90 pM to about 500 pM, about 90 pM to about 450 pM, about 90 pM to about 400 pM, about 90 pM to about 350 pM, about 90 pM to about 300 pM, about 90 pM to about 250 pM, about 90 pM to about 200 pM, about 90 pM to about 150 pM, about 90 pM to about 100 pM, about 100 pM to about 30 nM, about 100 pM to about 25 nM, about 100 pM to about 5 μM, about 100 pM to about 2 μM, about 100 pM to about 1 μM, about 100 pM to about 500 nM, about 100 pM to about 250 nM, about 100 pM to about 240 nM, about 100 pM to about 230 nM, about 100 pM to about 220 nM, about 100 pM to about 210 nM, about 100 pM to about 200 nM, about 100 pM to about 190 nM, about 100 pM to about 180 nM, about 100 pM to about 170 nM, about 100 pM to about 160 nM, about 100 pM to about 150 nM, about 100 pM to about 140 nM, about 100 pM to about 130 nM, about 100 pM to about 120 nM, about 100 pM to about 110 nM, about 100 pM to about 100 nM, about 100 pM to about 95 nM, about 100 pM to about 90 nM, about 100 pM to about 85 nM, about 100 pM to about 80 nM, about 100 pM to about 75 nM, about 100 pM to about 70 nM, about 100 pM to about 65 nM, about 100 pM to about 60 nM, about 100 pM to about 55 nM, about 100 pM to about 50 nM, about 100 pM to about 45 nM, about 100 pM to about 40 nM, about 100 pM to about 35 nM, about 100 pM to about 30 nM, about 100 pM to about 15 nM, about 100 pM to about 10 nM, about 100 pM to about 5 nM, about 100 pM to about 2 nM, about 100 pM to about 1 nM, about 100 pM to about 950 pM, about 100 pM to about 900 pM, about 100 pM to about 850 pM, about 100 pM to about 800 pM, about 100 pM to about 750 pM, about 100 pM to about 700 pM, about 100 pM to about 650 pM, about 100 pM to about 600 pM, about 100 pM to about 550 pM, about 100 pM to about 500 pM, about 100 pM to about 450 pM, about 100 pM to about 400 pM, about 100 pM to about 350 pM, about 100 pM to about 300 pM, about 100 pM to about 250 pM, about 100 pM to about 200 pM, about 100 pM to about 150 pM, about 150 pM to about 5 μM, about 150 pM to about 2 μM, about 150 pM to about 1 μM, about 150 pM to about 500 nM, about 150 pM to about 250 nM, about 150 pM to about 240 nM, about 150 pM to about 230 nM, about 150 pM to about 220 nM, about 150 pM to about 210 nM, about 150 pM to about 200 nM, about 150 pM to about 190 nM, about 150 pM to about 180 nM, about 150 pM to about 170 nM, about 150 pM to about 160 nM, about 150 pM to about 150 nM, about 150 pM to about 140 nM, about 150 pM to about 130 nM, about 150 pM to about 120 nM, about 150 pM to about 110 nM, about 150 pM to about 100 nM, about 150 pM to about 95 nM, about 150 pM to about 90 nM, about 150 pM to about 85 nM, about 150 pM to about 80 nM, about 150 pM to about 75 nM, about 150 pM to about 70 nM, about 150 pM to about 65 nM, about 150 pM to about 60 nM, about 150 pM to about 55 nM, about 150 pM to about 50 nM, about 150 pM to about 45 nM, about 150 pM to about 40 nM, about 150 pM to about 35 nM, about 150 pM to about 30 nM, about 150 pM to about 25 nM, about 150 pM to about 30 nM, about 150 pM to about 15 nM, about 150 pM to about 10 nM, about 150 pM to about 5 nM, about 150 pM to about 2 nM, about 150 pM to about 1 nM, about 150 pM to about 950 pM, about 150 pM to about 900 pM, about 150 pM to about 850 pM, about 150 pM to about 800 pM, about 150 pM to about 750 pM, about 150 pM to about 700 pM, about 150 pM to about 650 pM, about 150 pM to about 600 pM, about 150 pM to about 550 pM, about 150 pM to about 500 pM, about 150 pM to about 450 pM, about 150 pM to about 400 pM, about 150 pM to about 350 pM, about 150 pM to about 300 pM, about 150 pM to about 250 pM, about 150 pM to about 200 pM, about 200 pM to about 5 μM, about 200 pM to about 2 μM, about 200 pM to about 1 μM, about 200 pM to about 500 nM, about 200 pM to about 250 nM, about 200 pM to about 240 nM, about 200 pM to about 230 nM, about 200 pM to about 220 nM, about 200 pM to about 210 nM, about 200 pM to about 200 nM, about 200 pM to about 190 nM, about 200 pM to about 180 nM, about 200 pM to about 170 nM, about 200 pM to about 160 nM, about 200 pM to about 150 nM, about 200 pM to about 140 nM, about 200 pM to about 130 nM, about 200 pM to about 120 nM, about 200 pM to about 110 nM, about 200 pM to about 100 nM, about 200 pM to about 95 nM, about 200 pM to about 90 nM, about 200 pM to about 85 nM, about 200 pM to about 80 nM, about 200 pM to about 75 nM, about 200 pM to about 70 nM, about 200 pM to about 65 nM, about 200 pM to about 60 nM, about 200 pM to about 55 nM, about 200 pM to about 50 nM, about 200 pM to about 45 nM, about 200 pM to about 40 nM, about 200 pM to about 35 nM, about 200 pM to about 30 nM, about 200 pM to about 25 nM, about 200 pM to about 30 nM, about 200 pM to about 15 nM, about 200 pM to about 10 nM, about 200 pM to about 5 nM, about 200 pM to about 2 nM, about 200 pM to about 1 nM, about 200 pM to about 950 pM, about 200 pM to about 900 pM, about 200 pM to about 850 pM, about 200 pM to about 800 pM, about 200 pM to about 750 pM, about 200 pM to about 700 pM, about 200 pM to about 650 pM, about 200 pM to about 600 pM, about 200 pM to about 550 pM, about 200 pM to about 500 pM, about 200 pM to about 450 pM, about 200 pM to about 400 pM, about 200 pM to about 350 pM, about 200 pM to about 300 pM, about 200 pM to about 250 pM, about 300 pM to about 30 nM, about 300 pM to about 25 nM, about 300 pM to about 5 μM, about 300 pM to about 2 μM, about 300 pM to about 1 μM, about 300 pM to about 500 nM, about 300 pM to about 250 nM, about 300 pM to about 240 nM, about 300 pM to about 230 nM, about 300 pM to about 220 nM, about 300 pM to about 210 nM, about 300 pM to about 200 nM, about 300 pM to about 190 nM, about 300 pM to about 180 nM, about 300 pM to about 170 nM, about 300 pM to about 160 nM, about 300 pM to about 150 nM, about 300 pM to about 140 nM, about 300 pM to about 130 nM, about 300 pM to about 120 nM, about 300 pM to about 110 nM, about 300 pM to about 100 nM, about 300 pM to about 95 nM, about 300 pM to about 90 nM, about 300 pM to about 85 nM, about 300 pM to about 80 nM, about 300 pM to about 75 nM, about 300 pM to about 70 nM, about 300 pM to about 65 nM, about 300 pM to about 60 nM, about 300 pM to about 55 nM, about 300 pM to about 50 nM, about 300 pM to about 45 nM, about 300 pM to about 40 nM, about 300 pM to about 35 nM, about 300 pM to about 30 nM, about 300 pM to about 15 nM, about 300 pM to about 10 nM, about 300 pM to about 5 nM, about 300 pM to about 2 nM, about 300 pM to about 1 nM, about 300 pM to about 950 pM, about 300 pM to about 900 pM, about 300 pM to about 850 pM, about 300 pM to about 800 pM, about 300 pM to about 750 pM, about 300 pM to about 700 pM, about 300 pM to about 650 pM, about 300 pM to about 600 pM, about 300 pM to about 550 pM, about 300 pM to about 500 pM, about 300 pM to about 450 pM, about 300 pM to about 400 pM, about 300 pM to about 350 pM, about 400 pM to about 5 μM, about 400 pM to about 2 μM, about 400 pM to about 1 μM, about 400 pM to about 500 nM, about 400 pM to about 250 nM, about 400 pM to about 240 nM, about 400 pM to about 230 nM, about 400 pM to about 220 nM, about 400 pM to about 210 nM, about 400 pM to about 200 nM, about 400 pM to about 190 nM, about 400 pM to about 180 nM, about 400 pM to about 170 nM, about 400 pM to about 160 nM, about 400 pM to about 150 nM, about 400 pM to about 140 nM, about 400 pM to about 130 nM, about 400 pM to about 120 nM, about 400 pM to about 110 nM, about 400 pM to about 100 nM, about 400 pM to about 95 nM, about 400 pM to about 90 nM, about 400 pM to about 85 nM, about 400 pM to about 80 nM, about 400 pM to about 75 nM, about 400 pM to about 70 nM, about 400 pM to about 65 nM, about 400 pM to about 60 nM, about 400 pM to about 55 nM, about 400 pM to about 50 nM, about 400 pM to about 45 nM, about 400 pM to about 40 nM, about 400 pM to about 35 nM, about 400 pM to about 30 nM, about 400 pM to about 25 nM, about 400 pM to about 20 nM, about 400 pM to about 15 nM, about 400 pM to about 10 nM, about 400 pM to about 5 nM, about 400 pM to about 2 nM, about 400 pM to about 1 nM, about 400 pM to about 950 pM, about 400 pM to about 900 pM, about 400 pM to about 850 pM, about 400 pM to about 800 pM, about 400 pM to about 750 pM, about 400 pM to about 700 pM, about 400 pM to about 650 pM, about 400 pM to about 600 pM, about 400 pM to about 550 pM, about 400 pM to about 500 pM, about 500 pM to about 5 μM, about 500 pM to about 2 μM, about 500 pM to about 1 μM, about 500 pM to about 500 nM, about 500 pM to about 250 nM, about 500 pM to about 240 nM, about 500 pM to about 230 nM, about 500 pM to about 220 nM, about 500 pM to about 210 nM, about 500 pM to about 200 nM, about 500 pM to about 190 nM, about 500 pM to about 180 nM, about 500 pM to about 170 nM, about 500 pM to about 160 nM, about 500 pM to about 150 nM, about 500 pM to about 140 nM, about 500 pM to about 130 nM, about 500 pM to about 120 nM, about 500 pM to about 110 nM, about 500 pM to about 100 nM, about 500 pM to about 95 nM, about 500 pM to about 90 nM, about 500 pM to about 85 nM, about 500 pM to about 80 nM, about 500 pM to about 75 nM, about 500 pM to about 70 nM, about 500 pM to about 65 nM, about 500 pM to about 60 nM, about 500 pM to about 55 nM, about 500 pM to about 50 nM, about 500 pM to about 45 nM, about 500 pM to about 40 nM, about 500 pM to about 35 nM, about 500 pM to about 30 nM, about 500 pM to about 25 nM, about 500 pM to about 20 nM, about 500 pM to about 15 nM, about 500 pM to about 10 nM, about 500 pM to about 5 nM, about 500 pM to about 2 nM, about 500 pM to about 1 nM, about 500 pM to about 950 pM, about 500 pM to about 900 pM, about 500 pM to about 850 pM, about 500 pM to about 800 pM, about 500 pM to about 750 pM, about 500 pM to about 700 pM, about 500 pM to about 650 pM, about 500 pM to about 600 pM, about 500 pM to about 550 pM, about 600 pM to about 5 μM, about 600 pM to about 2 μM, about 600 pM to about 1 μM, about 600 pM to about 500 nM, about 600 pM to about 250 nM, about 600 pM to about 240 nM, about 600 pM to about 230 nM, about 600 pM to about 220 nM, about 600 pM to about 210 nM, about 600 pM to about 200 nM, about 600 pM to about 190 nM, about 600 pM to about 180 nM, about 600 pM to about 170 nM, about 600 pM to about 160 nM, about 600 pM to about 150 nM, about 600 pM to about 140 nM, about 600 pM to about 130 nM, about 600 pM to about 120 nM, about 600 pM to about 110 nM, about 600 pM to about 100 nM, about 600 pM to about 95 nM, about 600 pM to about 90 nM, about 600 pM to about 85 nM, about 600 pM to about 80 nM, about 600 pM to about 75 nM, about 600 pM to about 70 nM, about 600 pM to about 65 nM, about 600 pM to about 60 nM, about 600 pM to about 55 nM, about 600 pM to about 50 nM, about 600 pM to about 45 nM, about 600 pM to about 40 nM, about 600 pM to about 35 nM, about 600 pM to about 30 nM, about 600 pM to about 25 nM, about 600 pM to about 20 nM, about 600 pM to about 15 nM, about 600 pM to about 10 nM, about 600 pM to about 5 nM, about 600 pM to about 2 nM, about 600 pM to about 1 nM, about 600 pM to about 950 pM, about 600 pM to about 900 pM, about 600 pM to about 850 pM, about 600 pM to about 800 pM, about 600 pM to about 750 pM, about 600 pM to about 700 pM, about 600 pM to about 650 pM, about 700 pM to about 5 μM, about 700 pM to about 2 μM, about 700 pM to about 1 μM, about 700 pM to about 500 nM, about 700 pM to about 250 nM, about 700 pM to about 240 nM, about 700 pM to about 230 nM, about 700 pM to about 220 nM, about 700 pM to about 210 nM, about 700 pM to about 200 nM, about 700 pM to about 190 nM, about 700 pM to about 180 nM, about 700 pM to about 170 nM, about 700 pM to about 160 nM, about 700 pM to about 150 nM, about 700 pM to about 140 nM, about 700 pM to about 130 nM, about 700 pM to about 120 nM, about 700 pM to about 110 nM, about 700 pM to about 100 nM, about 700 pM to about 95 nM, about 700 pM to about 90 nM, about 700 pM to about 85 nM, about 700 pM to about 80 nM, about 700 pM to about 75 nM, about 700 pM to about 70 nM, about 700 pM to about 65 nM, about 700 pM to about 60 nM, about 700 pM to about 55 nM, about 700 pM to about 50 nM, about 700 pM to about 45 nM, about 700 pM to about 40 nM, about 700 pM to about 35 nM, about 700 pM to about 30 nM, about 700 pM to about 25 nM, about 700 pM to about 20 nM, about 700 pM to about 15 nM, about 700 pM to about 10 nM, about 700 pM to about 5 nM, about 700 pM to about 2 nM, about 700 pM to about 1 nM, about 700 pM to about 950 pM, about 700 pM to about 900 pM, about 700 pM to about 850 pM, about 700 pM to about 800 pM, about 700 pM to about 750 pM, about 800 pM to about 5 μM, about 800 pM to about 2 μM, about 800 pM to about 1 μM, about 800 pM to about 500 nM, about 800 pM to about 250 nM, about 800 pM to about 240 nM, about 800 pM to about 230 nM, about 800 pM to about 220 nM, about 800 pM to about 210 nM, about 800 pM to about 200 nM, about 800 pM to about 190 nM, about 800 pM to about 180 nM, about 800 pM to about 170 nM, about 800 pM to about 160 nM, about 800 pM to about 150 nM, about 800 pM to about 140 nM, about 800 pM to about 130 nM, about 800 pM to about 120 nM, about 800 pM to about 110 nM, about 800 pM to about 100 nM, about 800 pM to about 95 nM, about 800 pM to about 90 nM, about 800 pM to about 85 nM, about 800 pM to about 80 nM, about 800 pM to about 75 nM, about 800 pM to about 70 nM, about 800 pM to about 65 nM, about 800 pM to about 60 nM, about 800 pM to about 55 nM, about 800 pM to about 50 nM, about 800 pM to about 45 nM, about 800 pM to about 40 nM, about 800 pM to about 35 nM, about 800 pM to about 30 nM, about 800 pM to about 25 nM, about 800 pM to about 20 nM, about 800 pM to about 15 nM, about 800 pM to about 10 nM, about 800 pM to about 5 nM, about 800 pM to about 2 nM, about 800 pM to about 1 nM, about 800 pM to about 950 pM, about 800 pM to about 900 pM, about 800 pM to about 850 pM, about 900 pM to about 5 μM, about 900 pM to about 2 μM, about 900 pM to about 1 μM, about 900 pM to about 500 nM, about 900 pM to about 250 nM, about 900 pM to about 240 nM, about 900 pM to about 230 nM, about 900 pM to about 220 nM, about 900 pM to about 210 nM, about 900 pM to about 200 nM, about 900 pM to about 190 nM, about 900 pM to about 180 nM, about 900 pM to about 170 nM, about 900 pM to about 160 nM, about 900 pM to about 150 nM, about 900 pM to about 140 nM, about 900 pM to about 130 nM, about 900 pM to about 120 nM, about 900 pM to about 110 nM, about 900 pM to about 100 nM, about 900 pM to about 95 nM, about 900 pM to about 90 nM, about 900 pM to about 85 nM, about 900 pM to about 80 nM, about 900 pM to about 75 nM, about 900 pM to about 70 nM, about 900 pM to about 65 nM, about 900 pM to about 60 nM, about 900 pM to about 55 nM, about 900 pM to about 50 nM, about 900 pM to about 45 nM, about 900 pM to about 40 nM, about 900 pM to about 35 nM, about 900 pM to about 30 nM, about 900 pM to about 25 nM, about 900 pM to about 20 nM, about 900 pM to about 15 nM, about 900 pM to about 10 nM, about 900 pM to about 5 nM, about 900 pM to about 2 nM, about 900 pM to about 1 nM, about 900 pM to about 950 pM, about 1 nM to about 5 μM, about 1 nM to about 2 μM, about 1 nM to about 1 μM, about 1 nM to about 500 nM, about 1 nM to about 250 nM, about 1 nM to about 240 nM, about 1 nM to about 230 nM, about 1 nM to about 220 nM, about 1 nM to about 210 nM, about 1 nM to about 200 nM, about 1 nM to about 190 nM, about 1 nM to about 180 nM, about 1 nM to about 170 nM, about 1 nM to about 160 nM, about 1 nM to about 150 nM, about 1 nM to about 140 nM, about 1 nM to about 130 nM, about 1 nM to about 120 nM, about 1 nM to about 110 nM, about 1 nM to about 100 nM, about 1 nM to about 95 nM, about 1 nM to about 90 nM, about 1 nM to about 85 nM, about 1 nM to about 80 nM, about 1 nM to about 75 nM, about 1 nM to about 70 nM, about 1 nM to about 65 nM, about 1 nM to about 60 nM, about 1 nM to about 55 nM, about 1 nM to about 50 nM, about 1 nM to about 45 nM, about 1 nM to about 40 nM, about 1 nM to about 35 nM, about 1 nM to about 30 nM, about 1 nM to about 25 nM, about 1 nM to about 20 nM, about 1 nM to about 15 nM, about 1 nM to about 10 nM, about 1 nM to about 5 nM, about 2 nM to about 5 μM, about 2 nM to about 2 μM, about 2 nM to about 1 μM, about 2 nM to about 500 nM, about 2 nM to about 250 nM, about 2 nM to about 240 nM, about 2 nM to about 230 nM, about 2 nM to about 220 nM, about 2 nM to about 210 nM, about 2 nM to about 200 nM, about 2 nM to about 190 nM, about 2 nM to about 180 nM, about 2 nM to about 170 nM, about 2 nM to about 160 nM, about 2 nM to about 150 nM, about 2 nM to about 140 nM, about 2 nM to about 130 nM, about 2 nM to about 120 nM, about 2 nM to about 110 nM, about 2 nM to about 100 nM, about 2 nM to about 95 nM, about 2 nM to about 90 nM, about 2 nM to about 85 nM, about 2 nM to about 80 nM, about 2 nM to about 75 nM, about 2 nM to about 70 nM, about 2 nM to about 65 nM, about 2 nM to about 60 nM, about 2 nM to about 55 nM, about 2 nM to about 50 nM, about 2 nM to about 45 nM, about 2 nM to about 40 nM, about 2 nM to about 35 nM, about 2 nM to about 30 nM, about 2 nM to about 25 nM, about 2 nM to about 20 nM, about 2 nM to about 15 nM, about 2 nM to about 10 nM, about 2 nM to about 5 nM, about 4 nM to about 5 μM, about 4 nM to about 2 μM, about 4 nM to about 1 μM, about 4 nM to about 500 nM, about 4 nM to about 250 nM, about 4 nM to about 240 nM, about 4 nM to about 230 nM, about 4 nM to about 220 nM, about 4 nM to about 210 nM, about 4 nM to about 200 nM, about 4 nM to about 190 nM, about 4 nM to about 180 nM, about 4 nM to about 170 nM, about 4 nM to about 160 nM, about 4 nM to about 150 nM, about 4 nM to about 140 nM, about 4 nM to about 130 nM, about 4 nM to about 120 nM, about 4 nM to about 110 nM, about 4 nM to about 100 nM, about 4 nM to about 95 nM, about 4 nM to about 90 nM, about 4 nM to about 85 nM, about 4 nM to about 80 nM, about 4 nM to about 75 nM, about 4 nM to about 70 nM, about 4 nM to about 65 nM, about 4 nM to about 60 nM, about 4 nM to about 55 nM, about 4 nM to about 50 nM, about 4 nM to about 45 nM, about 4 nM to about 40 nM, about 4 nM to about 35 nM, about 4 nM to about 30 nM, about 4 nM to about 25 nM, about 4 nM to about 20 nM, about 4 nM to about 15 nM, about 4 nM to about 10 nM, about 4 nM to about 5 nM, about 5 nM to about 5 μM, about 5 nM to about 2 μM, about 5 nM to about 1 μM, about 5 nM to about 500 nM, about 5 nM to about 250 nM, about 5 nM to about 240 nM, about 5 nM to about 230 nM, about 5 nM to about 220 nM, about 5 nM to about 210 nM, about 5 nM to about 200 nM, about 5 nM to about 190 nM, about 5 nM to about 180 nM, about 5 nM to about 170 nM, about 5 nM to about 160 nM, about 5 nM to about 150 nM, about 5 nM to about 140 nM, about 5 nM to about 130 nM, about 5 nM to about 120 nM, about 5 nM to about 110 nM, about 5 nM to about 100 nM, about 5 nM to about 95 nM, about 5 nM to about 90 nM, about 5 nM to about 85 nM, about 5 nM to about 80 nM, about 5 nM to about 75 nM, about 5 nM to about 70 nM, about 5 nM to about 65 nM, about 5 nM to about 60 nM, about 5 nM to about 55 nM, about 5 nM to about 50 nM, about 5 nM to about 45 nM, about 5 nM to about 40 nM, about 5 nM to about 35 nM, about 5 nM to about 30 nM, about 5 nM to about 25 nM, about 5 nM to about 20 nM, about 5 nM to about 15 nM, about 5 nM to about 10 nM, about 10 nM to about 5 μM, about 10 nM to about 2 μM, about 10 nM to about 1 μM, about 10 nM to about 500 nM, about 10 nM to about 250 nM, about 10 nM to about 240 nM, about 10 nM to about 230 nM, about 10 nM to about 220 nM, about 10 nM to about 210 nM, about 10 nM to about 200 nM, about 10 nM to about 190 nM, about 10 nM to about 180 nM, about 10 nM to about 170 nM, about 10 nM to about 160 nM, about 10 nM to about 150 nM, about 10 nM to about 140 nM, about 10 nM to about 130 nM, about 10 nM to about 120 nM, about 10 nM to about 110 nM, about 10 nM to about 100 nM, about 10 nM to about 95 nM, about 10 nM to about 90 nM, about 10 nM to about 85 nM, about 10 nM to about 80 nM, about 10 nM to about 75 nM, about 10 nM to about 70 nM, about 10 nM to about 65 nM, about 10 nM to about 60 nM, about 10 nM to about 55 nM, about 10 nM to about 50 nM, about 10 nM to about 45 nM, about 10 nM to about 40 nM, about 10 nM to about 35 nM, about 10 nM to about 30 nM, about 10 nM to about 25 nM, about 10 nM to about 20 nM, about 10 nM to about 15 nM, about 15 nM to about 5 μM, about 15 nM to about 2 μM, about 15 nM to about 1 μM, about 15 nM to about 500 nM, about 15 nM to about 250 nM, about 15 nM to about 240 nM, about 15 nM to about 230 nM, about 15 nM to about 220 nM, about 15 nM to about 210 nM, about 15 nM to about 200 nM, about 15 nM to about 190 nM, about 15 nM to about 180 nM, about 15 nM to about 170 nM, about 15 nM to about 160 nM, about 15 nM to about 150 nM, about 15 nM to about 140 nM, about 15 nM to about 130 nM, about 15 nM to about 120 nM, about 15 nM to about 110 nM, about 15 nM to about 100 nM, about 15 nM to about 95 nM, about 15 nM to about 90 nM, about 15 nM to about 85 nM, about 15 nM to about 80 nM, about 15 nM to about 75 nM, about 15 nM to about 70 nM, about 15 nM to about 65 nM, about 15 nM to about 60 nM, about 15 nM to about 55 nM, about 15 nM to about 50 nM, about 15 nM to about 45 nM, about 15 nM to about 40 nM, about 15 nM to about 35 nM, about 15 nM to about 30 nM, about 15 nM to about 25 nM, about 15 nM to about 20 nM, about 20 nM to about 5 μM, about 20 nM to about 2 μM, about 20 nM to about 1 μM, about 20 nM to about 500 nM, about 20 nM to about 250 nM, about 20 nM to about 240 nM, about 20 nM to about 230 nM, about 20 nM to about 220 nM, about 20 nM to about 210 nM, about 20 nM to about 200 nM, about 20 nM to about 190 nM, about 20 nM to about 180 nM, about 20 nM to about 170 nM, about 20 nM to about 160 nM, about 20 nM to about 150 nM, about 20 nM to about 140 nM, about 20 nM to about 130 nM, about 20 nM to about 120 nM, about 20 nM to about 110 nM, about 20 nM to about 100 nM, about 20 nM to about 95 nM, about 20 nM to about 90 nM, about 20 nM to about 85 nM, about 20 nM to about 80 nM, about 20 nM to about 75 nM, about 20 nM to about 70 nM, about 20 nM to about 65 nM, about 20 nM to about 60 nM, about 20 nM to about 55 nM, about 20 nM to about 50 nM, about 20 nM to about 45 nM, about 20 nM to about 40 nM, about 20 nM to about 35 nM, about 20 nM to about 30 nM, about 20 nM to about 25 nM, about 25 nM to about 5 μM, about 25 nM to about 2 μM, about 25 nM to about 1 μM, about 25 nM to about 500 nM, about 25 nM to about 250 nM, about 25 nM to about 240 nM, about 25 nM to about 230 nM, about 25 nM to about 220 nM, about 25 nM to about 210 nM, about 25 nM to about 200 nM, about 25 nM to about 190 nM, about 25 nM to about 180 nM, about 25 nM to about 170 nM, about 25 nM to about 160 nM, about 25 nM to about 150 nM, about 25 nM to about 140 nM, about 25 nM to about 130 nM, about 25 nM to about 120 nM, about 25 nM to about 110 nM, about 25 nM to about 100 nM, about 25 nM to about 95 nM, about 25 nM to about 90 nM, about 25 nM to about 85 nM, about 25 nM to about 80 nM, about 25 nM to about 75 nM, about 25 nM to about 70 nM, about 25 nM to about 65 nM, about 25 nM to about 60 nM, about 25 nM to about 55 nM, about 25 nM to about 50 nM, about 25 nM to about 45 nM, about 25 nM to about 40 nM, about 25 nM to about 35 nM, about 25 nM to about 30 nM, about 30 nM to about 5 μM, about 30 nM to about 2 μM, about 30 nM to about 1 μM, about 30 nM to about 500 nM, about 30 nM to about 250 nM, about 30 nM to about 240 nM, about 30 nM to about 230 nM, about 30 nM to about 220 nM, about 30 nM to about 210 nM, about 30 nM to about 200 nM, about 30 nM to about 190 nM, about 30 nM to about 180 nM, about 30 nM to about 170 nM, about 30 nM to about 160 nM, about 30 nM to about 150 nM, about 30 nM to about 140 nM, about 30 nM to about 130 nM, about 30 nM to about 120 nM, about 30 nM to about 110 nM, about 30 nM to about 100 nM, about 30 nM to about 95 nM, about 30 nM to about 90 nM, about 30 nM to about 85 nM, about 30 nM to about 80 nM, about 30 nM to about 75 nM, about 30 nM to about 70 nM, about 30 nM to about 65 nM, about 30 nM to about 60 nM, about 30 nM to about 55 nM, about 30 nM to about 50 nM, about 30 nM to about 45 nM, about 30 nM to about 40 nM, about 30 nM to about 35 nM, about 40 nM to about 5 μM, about 40 nM to about 2 μM, about 40 nM to about 1 μM, about 40 nM to about 500 nM, about 40 nM to about 250 nM, about 40 nM to about 240 nM, about 40 nM to about 230 nM, about 40 nM to about 220 nM, about 40 nM to about 210 nM, about 40 nM to about 200 nM, about 40 nM to about 190 nM, about 40 nM to about 180 nM, about 40 nM to about 170 nM, about 40 nM to about 160 nM, about 40 nM to about 150 nM, about 40 nM to about 140 nM, about 40 nM to about 130 nM, about 40 nM to about 120 nM, about 40 nM to about 110 nM, about 40 nM to about 100 nM, about 40 nM to about 95 nM, about 40 nM to about 90 nM, about 40 nM to about 85 nM, about 40 nM to about 80 nM, about 40 nM to about 75 nM, about 40 nM to about 70 nM, about 40 nM to about 65 nM, about 40 nM to about 60 nM, about 40 nM to about 55 nM, about 40 nM to about 50 nM, about 40 nM to about 45 nM, about 50 nM to about 5 μM, about 50 nM to about 2 μM, about 50 nM to about 1 μM, about 50 nM to about 500 nM, about 50 nM to about 250 nM, about 50 nM to about 240 nM, about 50 nM to about 230 nM, about 50 nM to about 220 nM, about 50 nM to about 210 nM, about 50 nM to about 200 nM, about 50 nM to about 190 nM, about 50 nM to about 180 nM, about 50 nM to about 170 nM, about 50 nM to about 160 nM, about 50 nM to about 150 nM, about 50 nM to about 140 nM, about 50 nM to about 130 nM, about 50 nM to about 120 nM, about 50 nM to about 110 nM, about 50 nM to about 100 nM, about 50 nM to about 95 nM, about 50 nM to about 90 nM, about 50 nM to about 85 nM, about 50 nM to about 80 nM, about 50 nM to about 75 nM, about 50 nM to about 70 nM, about 50 nM to about 65 nM, about 50 nM to about 60 nM, about 50 nM to about 55 nM, about 60 nM to about 5 μM, about 60 nM to about 2 μM, about 60 nM to about 1 μM, about 60 nM to about 500 nM, about 60 nM to about 250 nM, about 60 nM to about 240 nM, about 60 nM to about 230 nM, about 60 nM to about 220 nM, about 60 nM to about 210 nM, about 60 nM to about 200 nM, about 60 nM to about 190 nM, about 60 nM to about 180 nM, about 60 nM to about 170 nM, about 60 nM to about 160 nM, about 60 nM to about 150 nM, about 60 nM to about 140 nM, about 60 nM to about 130 nM, about 60 nM to about 120 nM, about 60 nM to about 110 nM, about 60 nM to about 100 nM, about 60 nM to about 95 nM, about 60 nM to about 90 nM, about 60 nM to about 85 nM, about 60 nM to about 80 nM, about 60 nM to about 75 nM, about 60 nM to about 70 nM, about 60 nM to about 65 nM, about 70 nM to about 5 μM, about 70 nM to about 2 μM, about 70 nM to about 1 μM, about 70 nM to about 500 nM, about 70 nM to about 250 nM, about 70 nM to about 240 nM, about 70 nM to about 230 nM, about 70 nM to about 220 nM, about 70 nM to about 210 nM, about 70 nM to about 200 nM, about 70 nM to about 190 nM, about 70 nM to about 180 nM, about 70 nM to about 170 nM, about 70 nM to about 160 nM, about 70 nM to about 150 nM, about 70 nM to about 140 nM, about 70 nM to about 130 nM, about 70 nM to about 120 nM, about 70 nM to about 110 nM, about 70 nM to about 100 nM, about 70 nM to about 95 nM, about 70 nM to about 90 nM, about 70 nM to about 85 nM, about 70 nM to about 80 nM, about 70 nM to about 75 nM, about 80 nM to about 5 μM, about 80 nM to about 2 μM, about 80 nM to about 1 μM, about 80 nM to about 500 nM, about 80 nM to about 250 nM, about 80 nM to about 240 nM, about 80 nM to about 230 nM, about 80 nM to about 220 nM, about 80 nM to about 210 nM, about 80 nM to about 200 nM, about 80 nM to about 190 nM, about 80 nM to about 180 nM, about 80 nM to about 170 nM, about 80 nM to about 160 nM, about 80 nM to about 150 nM, about 80 nM to about 140 nM, about 80 nM to about 130 nM, about 80 nM to about 120 nM, about 80 nM to about 110 nM, about 80 nM to about 100 nM, about 80 nM to about 95 nM, about 80 nM to about 90 nM, about 80 nM to about 85 nM, about 90 nM to about 5 μM, about 90 nM to about 2 μM, about 90 mM to about 1 μM, about 90 nM to about 500 nM, about 90 nM to about 250 nM, about 90 nM to about 240 nM, about 90 nM to about 230 nM, about 90 nM to about 220 nM, about 90 nM to about 210 nM, about 90 nM to about 200 nM, about 90 nM to about 190 nM, about 90 nM to about 180 nM, about 90 nM to about 170 nM, about 90 nM to about 160 nM, about 90 nM to about 150 nM, about 90 nM to about 140 nM, about 90 nM to about 130 nM, about 90 nM to about 120 nM, about 90 nM to about 110 nM, about 90 nM to about 100 nM, about 90 nM to about 95 nM, about 100 nM to about 5 μM, about 100 nM to about 2 μM, about 100 nM to about 1 μM, about 100 nM to about 500 nM, about 100 nM to about 250 nM, about 100 nM to about 240 nM, about 100 nM to about 230 nM, about 100 nM to about 220 nM, about 100 nM to about 210 nM, about 100 nM to about 200 nM, about 100 nM to about 190 nM, about 100 nM to about 180 nM, about 100 nM to about 170 nM, about 100 nM to about 160 nM, about 100 nM to about 150 nM, about 100 nM to about 140 nM, about 100 nM to about 130 nM, about 100 nM to about 120 nM, about 100 nM to about 110 nM, about 110 nM to about 5 μM, about 110 nM to about 2 μM, about 110 nM to about 1 μM, about 110 nM to about 500 nM, about 110 nM to about 250 nM, about 110 nM to about 240 nM, about 110 nM to about 230 nM, about 110 nM to about 220 nM, about 110 nM to about 210 nM, about 110 nM to about 200 nM, about 110 nM to about 190 nM, about 110 nM to about 180 nM, about 110 nM to about 170 nM, about 110 nM to about 160 nM, about 110 nM to about 150 nM, about 110 nM to about 140 nM, about 110 nM to about 130 nM, about 110 nM to about 120 nM, about 120 nM to about 5 μM, about 120 nM to about 2 μM, about 120 nM to about 1 μM, about 120 nM to about 500 nM, about 120 nM to about 250 nM, about 120 nM to about 240 nM, about 120 nM to about 230 nM, about 120 nM to about 220 nM, about 120 nM to about 210 nM, about 120 nM to about 200 nM, about 120 nM to about 190 nM, about 120 nM to about 180 nM, about 120 nM to about 170 nM, about 120 nM to about 160 nM, about 120 nM to about 150 nM, about 120 nM to about 140 nM, about 120 nM to about 130 nM, about 130 nM to about 5 μM, about 130 nM to about 2 μM, about 130 nM to about 1 μM, about 130 nM to about 500 nM, about 130 nM to about 250 nM, about 130 nM to about 240 nM, about 130 nM to about 230 nM, about 130 nM to about 220 nM, about 130 nM to about 210 nM, about 130 nM to about 200 nM, about 130 nM to about 190 nM, about 130 nM to about 180 nM, about 130 nM to about 170 nM, about 130 nM to about 160 nM, about 130 nM to about 150 nM, about 130 nM to about 140 nM, about 140 nM to about 5 μM, about 140 nM to about 2 μM, about 140 nM to about 1 μM, about 140 nM to about 500 nM, about 140 nM to about 250 nM, about 140 nM to about 240 nM, about 140 nM to about 230 nM, about 140 nM to about 220 nM, about 140 nM to about 210 nM, about 140 nM to about 200 nM, about 140 nM to about 190 nM, about 140 nM to about 180 nM, about 140 nM to about 170 nM, about 140 nM to about 160 nM, about 140 nM to about 150 nM, about 150 nM to about 5 μM, about 150 nM to about 2 μM, about 150 nM to about 1 μM, about 150 nM to about 500 nM, about 150 nM to about 250 nM, about 150 nM to about 240 nM, about 150 nM to about 230 nM, about 150 nM to about 220 nM, about 150 nM to about 210 nM, about 150 nM to about 200 nM, about 150 nM to about 190 nM, about 150 nM to about 180 nM, about 150 nM to about 170 nM, about 150 nM to about 160 nM, about 160 nM to about 5 μM, about 160 nM to about 2 μM, about 160 nM to about 1 μM, about 160 nM to about 500 nM, about 160 nM to about 250 nM, about 160 nM to about 240 nM, about 160 nM to about 230 nM, about 160 nM to about 220 nM, about 160 nM to about 210 nM, about 160 nM to about 200 nM, about 160 nM to about 190 nM, about 160 nM to about 180 nM, about 160 nM to about 170 nM, about 170 nM to about 5 μM, about 170 nM to about 2 μM, about 170 nM to about 1 μM, about 170 nM to about 500 nM, about 170 nM to about 250 nM, about 170 nM to about 240 nM, about 170 nM to about 230 nM, about 170 nM to about 220 nM, about 170 nM to about 210 nM, about 170 nM to about 200 nM, about 170 nM to about 190 nM, about 170 nM to about 180 nM, about 180 nM to about 5 μM, about 180 nM to about 2 μM, about 180 nM to about 1 μM, about 180 nM to about 500 nM, about 180 nM to about 250 nM, about 180 nM to about 240 nM, about 180 nM to about 230 nM, about 180 nM to about 220 nM, about 180 nM to about 210 nM, about 180 nM to about 200 nM, about 180 nM to about 190 nM, about 190 nM to about 5 μM, about 190 nM to about 2 μM, about 190 nM to about 1 μM, about 190 nM to about 500 nM, about 190 nM to about 250 nM, about 190 nM to about 240 nM, about 190 nM to about 230 nM, about 190 nM to about 220 nM, about 190 nM to about 210 nM, about 190 nM to about 200 nM, about 200 nM to about 5 μM, about 200 nM to about 2 μM, about 200 nM to about 1 μM, about 200 nM to about 500 nM, about 200 nM to about 250 nM, about 200 nM to about 240 nM, about 200 nM to about 230 nM, about 200 nM to about 220 nM, about 200 nM to about 210 nM, about 210 nM to about 5 μM, about 210 nM to about 2 μM, about 210 nM to about 1 μM, about 210 nM to about 500 nM, about 210 nM to about 250 nM, about 210 nM to about 240 nM, about 210 nM to about 230 nM, about 210 nM to about 220 nM, about 220 nM to about 5 μM, about 220 nM to about 2 μM, about 220 nM to about 1 μM, about 220 nM to about 500 nM, about 220 nM to about 250 nM, about 220 nM to about 240 nM, about 220 nM to about 230 nM, about 230 nM to about 5 μM, about 230 nM to about 2 μM, about 230 nM to about 1 μM, about 230 nM to about 500 nM, about 230 nM to about 250 nM, about 230 nM to about 240 nM, about 240 nM to about 5 μM, about 240 nM to about 2 μM, about 240 nM to about 1 μM, about 240 nM to about 500 nM, about 240 nM to about 250 nM, about 250 nM to about 5 μM, about 250 nM to about 2 μM, about 250 nM to about 1 μM, about 250 nM to about 500 nM, about 500 nM to about 5 μM, about 500 nM to about 2 μM, about 500 nM to about 1 μM, about 1 μM to about 5 μM, about 1 μM to about 2 μM, or about 2 μM to about 5 μM).

[0594] In some embodiments of any of the ABPCs described herein, the K_{D} of the first antigen-binding domain (and optionally, the second antigen-binding domain, if present) at a pH of about 4.0 to about 6.5 (e.g., any of the subranges of this range described herein) can be greater than 1 nM (e.g., between about 1 nM to about 1 mM, about 1 nM to about 900 μM, about 1 nM to about 800 μM, about 1 nM to about 700 μM, about 1 nM to about 600 μM, about 1 nM to about 500 μM, about 1 nM to about 400 μM, about 1 nM to about 300 μM, about 1 nM to about 200 μM, about 1 nM to about 100 μM, about 1 nM to about 90 μM, about 1 nM to about 80 μM, about 1 nM to about 70 μM, about 1 nM to about 60 μM, about 1 nM to about 50 μM, about 1 nM to about 40 μM, about 1 nM to about 30 μM, about 1 nM to about 20 μM, about 1 nM to about 10 μM, about 1 nM to about 5 μM, about 1 nM to about 4 μM, about 1 nM to about 2 μM, about 1 nM to about 1 μM, about 1 nM to about 900 nM, about 1 nM to about 800 nM, about 1 nM to about 700 nM, about 1 nM to about 600 nM, about 1 nM to about 500 nM, about 1 nM to about 400 nM, about 1 nM to about 300 nM, about 1 nM to about 200 nM, about 1 nM to about 100 nM, about 1 nM to about 90 nM, about 1 nM to about 80 nM, about 1 nM to about 70 nM, about 1 nM to about 60 nM, about 1 nM to about 50 nM, about 1 nM to about 40 nM, about 1 nM to about 30 nM, about 2 nM to about 1 mM, about 2 nM to about 900 μM, about 2 nM to about 800 μM, about 2 nM to about 700 μM, about 2 nM to about 600 μM, about 2 nM to about 500 μM, about 2 nM to about 400 μM, about 2 nM to about 300 μM, about 2 nM to about 200 μM, about 2 nM to about 100 μM, about 2 nM to about 90 μM, about 2 nM to about 80 μM, about 2 nM to about 70 μM, about 2 nM to about 60 μM, about 2 nM to about 50 μM, about 2 nM to about 40 μM, about 2 nM to about 30 μM, about 2 nM to about 20 μM, about 2 nM to about 10 μM, about 2 nM to about 5 μM, about 2 nM to about 4 μM, about 2 nM to about 2 μM, about 2 nM to about 1 μM, about 2 nM to about 900 nM, about 2 nM to about 800 nM, about 2 nM to about 700 nM, about 2 nM to about 600 nM, about 2 nM to about 500 nM, about 2 nM to about 400 nM, about 2 nM to about 300 nM, about 2 nM to about 200 nM, about 2 nM to about 100 nM, about 2 nM to about 90 nM, about 2 nM to about 80 nM, about 2 nM to about 70 nM, about 2 nM to about 60 nM, about 2 nM to about 50 nM, about 2 nM to about 40 nM, about 2 nM to about 30 nM, about 5 nM to about 1 mM, about 5 nM to about 900 μM, about 5 nM to about 800 μM, about 5 nM to about 700 μM, about 5 nM to about 600 μM, about 5 nM to about 500 μM, about 5 nM to about 400 μM, about 5 nM to about 300 μM, about 5 nM to about 200 μM, about 5 nM to about 100 μM, about 5 nM to about 90 μM, about 5 nM to about 80 μM, about 5 nM to about 70 μM, about 5 nM to about 60 μM, about 5 nM to about 50 μM, about 5 nM to about 40 μM, about 5 nM to about 30 μM, about 5 nM to about 20 μM, about 5 nM to about 10 μM, about 5 nM to about 5 μM, about 5 nM to about 4 μM, about 5 nM to about 2 μM, about 5 nM to about 1 μM, about 5 nM to about 900 nM, about 5 nM to about 800 nM, about 5 nM to about 700 nM, about 5 nM to about 600 nM, about 5 nM to about 500 nM, about 5 nM to about 400 nM, about 5 nM to about 300 nM, about 5 nM to about 200 nM, about 5 nM to about 100 nM, about 5 nM to about 90 nM, about 5 nM to about 80 nM, about 5 nM to about 70 nM, about 5 nM to about 60 nM, about 5 nM to about 50 nM, about 5 nM to about 40 nM, about 5 nM to about 30 nM, about 10 nM to about 1 mM, about 10 nM to about 900 μM, about 10 nM to about 800 μM, about 10 nM to about 700 μM, about 10 nM to about 600 μM, about 10 nM to about 500 μM, about 10 nM to about 400 μM, about 10 nM to about 300 μM, about 10 nM to about 200 μM, about 10 nM to about 100 μM, about 10 nM to about 90 μM, about 10 nM to about 80 μM, about 10 nM to about 70 μM, about 10 nM to about 60 μM, about 10 nM to about 50 μM, about 10 nM to about 40 μM, about 10 nM to about 30 μM, about 10 nM to about 20 μM, about 10 nM to about 10 μM, about 10 nM to about 5 μM, about 10 nM to about 4 μM, about 10 nM to about 2 μM, about 10 nM to about 1 μM, about 10 nM to about 900 nM, about 10 nM to about 800 nM, about 10 nM to about 700 nM, about 10 nM to about 600 nM, about 10 nM to about 500 nM, about 10 nM to about 400 nM, about 10 nM to about 300 nM, about 10 nM to about 200 nM, about 10 nM to about 100 nM, about 10 nM to about 90 nM, about 10 nM to about 80 nM, about 10 nM to about 70 nM, about 10 nM to about 60 nM, about 10 nM to about 50 nM, about 10 nM to about 40 nM, about 10 nM to about 30 nM, about 20 nM to about 1 mM, about 20 nM to about 900 μM, about 20 nM to about 800 μM, about 20 nM to about 700 μM, about 20 nM to about 600 μM, about 20 nM to about 500 μM, about 20 nM to about 400 μM, about 20 nM to about 300 μM, about 20 nM to about 200 μM, about 20 nM to about 100 μM, about 20 nM to about 90 μM, about 20 nM to about 80 μM, about 20 nM to about 70 μM, about 20 nM to about 60 μM, about 20 nM to about 50 μM, about 20 nM to about 40 μM, about 20 nM to about 30 μM, about 20 nM to about 20 μM, about 20 nM to about 10 μM, about 20 nM to about 5 μM, about 20 nM to about 4 μM, about 20 nM to about 2 μM, about 20 nM to about 1 μM, about 20 nM to about 900 nM, about 20 nM to about 800 nM, about 20 nM to about 700 nM, about 20 nM to about 600 nM, about 20 nM to about 500 nM, about 20 nM to about 400 nM, about 20 nM to about 300 nM, about 20 nM to about 200 nM, about 20 nM to about 100 nM, about 20 nM to about 90 nM, about 20 nM to about 80 nM, about 20 nM to about 70 nM, about 20 nM to about 60 nM, about 20 nM to about 50 nM, about 20 nM to about 40 nM, about 20 nM to about 30 nM; about 1 μM to about 1 mM, about 1 μM to about 900 μM, about 1 μM to about 800 μM, about 1 μM to about 700 μM, about 1 μM to about 600 μM, about 1 μM to about 500 μM, about 1 μM to about 400 μM, about 1 μM to about 300 μM, about 1 μM to about 200 μM, about 1 μM to about 100 μM, about 1 μM to about 90 μM, about 1 μM to about 80 μM, about 1 μM to about 70 μM, about 1 μM to about 60 μM, about 1 μM to about 50 μM, about 1 μM to about 40 μM, about 1 μM to about 30 μM, about 1 μM to about 20 μM, about 1 μM to about 10 μM, about 1 μM to about 5 μM, about 1 μM to about 4 μM, about 1 μM to about 3 μM, about 1 μM to about 2 μM, about 2 μM to about 1 mM, about 2 μM to about 900 μM, about 2 μM to about 800 μM, about 2 μM to about 700 μM, about 2 μM to about 600 μM, about 2 μM to about 500 μM, about 2 μM to about 400 μM, about 2 μM to about 300 μM, about 2 μM to about 200 μM, about 2 μM to about 100 μM, about 2 μM to about 90 μM, about 2 μM to about 80 μM, about 2 μM to about 70 μM, about 2 μM to about 60 μM, about 2 μM to about 50 μM, about 2 μM to about 40 μM, about 2 μM to about 30 μM, about 2 μM to about 20 μM, about 2 μM to about 10 μM, about 2 μM to about 5 μM, about 2 μM to about 4 μM, about 2 μM to about 3 μM, about 5 μM to about 1 mM, about 5 μM to about 900 μM, about 5 μM to about 800 μM, about 5 μM to about 700 μM, about 5 μM to about 600 μM, about 5 μM to about 500 μM, about 5 μM to about 400 μM, about 5 μM to about 300 μM, about 5 μM to about 200 μM, about 5 μM to about 100 μM, about 5 μM to about 90 μM, about 5 μM to about 80 μM, about 5 μM to about 70 μM, about 5 μM to about 60 μM, about 5 μM to about 50 μM, about 5 μM to about 40 μM, about 5 μM to about 30 μM, about 5 μM to about 20 μM, about 5 μM to about 10 μM, about 10 μM to about 1 mM, about 10 μM to about 900 μM, about 10 μM to about 800 μM, about 10 μM to about 700 μM, about 10 μM to about 600 μM, about 10 μM to about 500 μM, about 10 μM to about 400 μM, about 10 μM to about 300 μM, about 10 μM to about 200 μM, about 10 μM to about 100 μM, about 10 μM to about 90 μM, about 10 μM to about 80 μM, about 10 μM to about 70 μM, about 10 μM to about 60 μM, about 10 μM to about 50 μM, about 10 μM to about 40 μM, about 10 μM to about 30 μM, about 10 μM to about 20 μM, about 20 μM to about 1 mM, about 20 μM to about 900 μM, about 20 μM to about 800 μM, about 20 μM to about 700 μM, about 20 μM to about 600 μM, about 20 μM to about 500 μM, about 20 μM to about 400 μM, about 20 μM to about 300 μM, about 20 μM to about 200 μM, about 20 μM to about 100 μM, about 20 μM to about 90 μM, about 20 μM to about 80 μM, about 20 μM to about 70 μM, about 20 μM to about 60 μM, about 20 μM to about 50 μM, about 20 μM to about 40 μM, about 20 μM to about 30 μM, about 30 μM to about 1 mM, about 30 μM to about 900 μM, about 30 μM to about 800 μM, about 30 μM to about 700 μM, about 30 μM to about 600 μM, about 30 μM to about 500 μM, about 30 μM to about 400 μM, about 30 μM to about 300 μM, about 30 μM to about 200 μM, about 30 μM to about 100 μM, about 30 μM to about 90 μM, about 30 μM to about 80 μM, about 30 μM to about 70 μM, about 30 μM to about 60 μM, about 30 μM to about 50 μM, about 30 μM to about 40 μM, about 40 μM to about 1 mM, about 40 μM to about 900 μM, about 40 μM to about 800 μM, about 40 μM to about 700 μM, about 40 μM to about 600 μM, about 40 μM to about 500 μM, about 40 μM to about 400 μM, about 40 μM to about 300 μM, about 40 μM to about 200 μM, about 40 μM to about 100 μM, about 40 μM to about 90 μM, about 40 μM to about 80 μM, about 40 μM to about 70 μM, about 40 μM to about 60 μM, about 40 μM to about 50 μM, about 50 μM to about 1 mM, about 50 μM to about 900 μM, about 50 μM to about 800 μM, about 50 μM to about 700 μM, about 50 μM to about 600 μM, about 50 μM to about 500 μM, about 50 μM to about 400 μM, about 50 μM to about 300 μM, about 50 μM to about 200 μM, about 50 μM to about 100 μM, about 50 μM to about 90 μM, about 50 μM to about 80 μM, about 50 μM to about 70 μM, about 50 μM to about 60 μM, about 60 μM to about 1 mM, about 60 μM to about 900 μM, about 60 μM to about 800 μM, about 60 μM to about 700 μM, about 60 μM to about 600 μM, about 60 μM to about 500 μM, about 60 μM to about 400 μM, about 60 μM to about 300 μM, about 60 μM to about 200 μM, about 60 μM to about 100 μM, about 60 μM to about 90 μM, about 60 μM to about 80 μM, about 60 μM to about 70 μM, about 70 μM to about 1 mM, about 70 μM to about 900 μM, about 70 μM to about 800 μM, about 70 μM to about 700 μM, about 70 μM to about 600 μM, about 70 μM to about 500 μM, about 70 μM to about 400 μM, about 70 μM to about 300 μM, about 70 μM to about 200 μM, about 70 μM to about 100 μM, about 70 μM to about 90 μM, about 70 μM to about 80 μM, about 80 μM to about 1 mM, about 80 μM to about 900 μM, about 80 μM to about 800 μM, about 80 μM to about 700 μM, about 80 μM to about 600 μM, about 80 μM to about 500 μM, about 80 μM to about 400 μM, about 80 μM to about 300 μM, about 80 μM to about 200 μM, about 80 μM to about 100 μM, about 80 μM to about 90 μM, about 90 μM to about 1 mM, about 90 μM to about 900 μM, about 90 μM to about 800 μM, about 90 μM to about 700 μM, about 90 μM to about 600 μM, about 90 μM to about 500 μM, about 90 μM to about 400 μM, about 90 μM to about 300 μM, about 90 μM to about 200 μM, about 90 μM to about 100 μM, about 100 μM to about 1 mM, about 100 μM to about 900 μM, about 100 μM to about 800 μM, about 100 μM to about 700 μM, about 100 μM to about 600 μM, about 100 μM to about 500 μM, about 100 μM to about 400 μM, about 100 μM to about 300 μM, about 100 μM to about 200 μM, about 200 μM to about 1 mM, about 200 μM to about 900 μM, about 200 μM to about 800 μM, about 200 μM to about 700 μM, about 200 μM to about 600 μM, about 200 μM to about 500 μM, about 200 μM to about 400 μM, about 200 μM to about 300 μM, about 300 μM to about 1 mM, about 300 μM to about 900 μM, about 300 μM to about 800 μM, about 300 μM to about 700 μM, about 300 μM to about 600 μM, about 300 μM to about 500 μM, about 300 μM to about 400 μM, about 400 μM to about 1 mM, about 400 μM to about 900 μM, about 400 μM to about 800 μM, about 400 μM to about 700 μM, about 400 μM to about 600 μM, about 400 μM to about 500 μM, about 500 μM to about 1 mM, about 500 μM to about 900 μM, about 500 μM to about 800 μM, about 500 μM to about 700 μM, about 500 μM to about 600 μM, about 600 μM to about 1 mM, about 600 μM to about 900 μM, about 600 μM to about 800 μM, about 600 μM to about 700 μM, about 700 μM to about 1 mM, about 700 μM to about 900 μM, about 700 μM to about 800 μM, about 800 μM to about 1 mM, about 800 μM to about 900 μM, or about 900 μM to about 1 mM).

[0595] A variety of different methods known in the art can be used to determine the K_{D} values of any of the antigen-binding protein constructs described herein (e.g., an electrophoretic mobility shift assay, a filter binding assay, surface plasmon resonance, a biomolecular binding kinetics assay, in vitro binding assay on antigen-expressing cells, etc.).

[0596] In some examples of any of the ABPCs described herein, the half-life of the ABPC in vivo is decreased (e.g., a detectable decrease) (e.g., at least a 1% decrease, at least a 5% decrease, at least a 10% decrease, at least a 15% decrease, at least a 20% decrease, at least a 25% decrease, at least a 30% decrease, at least a 35% decrease, at least a 40% decrease, at least a 45% decrease, at least a 50% decrease, at least a 55% decrease, at least a 60% decrease, at least a 65% decrease, at least a 70% decrease, at least a 75% decrease, at least a 80% decrease, at least a 85% decrease, at least a 90% decrease, at least a 95% decrease, or at least a 99% decrease, or about a 1% decrease to about a 99% decrease, about a 1% decrease to about a 95% decrease, about a 1% decrease to about a 90% decrease, about a 1% decrease to about a 85% decrease, about a 1% decrease to about a 80% decrease, about a 1% decrease to about a 75% decrease, about a 1% decrease to about a 70% decrease, about a 1% decrease to about a 65% decrease, about a 1% decrease to about a 60% decrease, about a 1% decrease to about a 55% decrease, about a 1% decrease to about a 50% decrease, about a 1% decrease to about a 45% decrease, about a 1% decrease to about a 40% decrease, about a 1% decrease to about a 35% decrease, about a 1% decrease to about a 30% decrease, about a 1% decrease to about a 25% decrease, about a 1% decrease to about a 20% decrease, about a 1% decrease to about a 15% decrease, about a 1% decrease to about a 10% decrease, about a 1% decrease to about a 5% decrease, about a 5% decrease to about a 99% decrease, about a 5% decrease to about a 95% decrease, about a 5% decrease to about a 90% decrease, about a 5% decrease to about a 85% decrease, about a 5% decrease to about a 80% decrease, about a 5% decrease to about a 75% decrease, about a 5% decrease to about a 70% decrease, about a 5% decrease to about a 65% decrease, about a 5% decrease to about a 60% decrease, about a 5% decrease to about a 55% decrease, about a 5% decrease to about a 50% decrease, about a 5% decrease to about a 45% decrease, about a 5% decrease to about a 40% decrease, about a 5% decrease to about a 35% decrease, about a 5% decrease to about a 30% decrease, about a 5% decrease to about a 25% decrease, about a 5% decrease to about a 20% decrease, about a 5% decrease to about a 15% decrease, about a 5% decrease to about a 10% decrease, about a 10% decrease to about a 99% decrease, about a 10% decrease to about a 95% decrease, about a 10% decrease to about a 90% decrease, about a 10% decrease to about a 85% decrease, about a 10% decrease to about a 80% decrease, about a 10% decrease to about a 75% decrease, about a 10% decrease to about a 70% decrease, about a 10% decrease to about a 65% decrease, about a 10% decrease to about a 60% decrease, about a 10% decrease to about a 55% decrease, about a 10% decrease to about a 50% decrease, about a 10% decrease to about a 45% decrease, about a 10% decrease to about a 40% decrease, about a 10% decrease to about a 35% decrease, about a 10% decrease to about a 30% decrease, about a 10% decrease to about a 25% decrease, about a 10% decrease to about a 20% decrease, about a 10% decrease to about a 15% decrease, about a 15% decrease to about a 99% decrease, about a 15% decrease to about a 95% decrease, about a 15% decrease to about a 90% decrease, about a 15% decrease to about a 85% decrease, about a 15% decrease to about a 80% decrease, about a 15% decrease to about a 75% decrease, about a 15% decrease to about a 70% decrease, about a 15% decrease to about a 65% decrease, about a 15% decrease to about a 60% decrease, about a 15% decrease to about a 55% decrease, about a 15% decrease to about a 50% decrease, about a 15% decrease to about a 45% decrease, about a 15% decrease to about a 40% decrease, about a 15% decrease to about a 35% decrease, about a 15% decrease to about a 30% decrease, about a 15% decrease to about a 25% decrease, about a 15% decrease to about a 20% decrease, about a 20% decrease to about a 99% decrease, about a 20% decrease to about a 95% decrease, about a 20% decrease to about a 90% decrease, about a 20% decrease to about a 85% decrease, about a 20% decrease to about a 80% decrease, about a 20% decrease to about a 75% decrease, about a 20% decrease to about a 70% decrease, about a 20% decrease to about a 65% decrease, about a 20% decrease to about a 60% decrease, about a 20% decrease to about a 55% decrease, about a 20% decrease to about a 50% decrease, about a 20% decrease to about a 45% decrease, about a 20% decrease to about a 40% decrease, about a 20% decrease to about a 35% decrease, about a 20% decrease to about a 30% decrease, about a 20% decrease to about a 25% decrease, about a 25% decrease to about a 99% decrease, about a 25% decrease to about a 95% decrease, about a 25% decrease to about a 90% decrease, about a 25% decrease to about a 85% decrease, about a 25% decrease to about a 80% decrease, about a 25% decrease to about a 75% decrease, about a 25% decrease to about a 70% decrease, about a 25% decrease to about a 65% decrease, about a 25% decrease to about a 60% decrease, about a 25% decrease to about a 55% decrease, about a 25% decrease to about a 50% decrease, about a 25% decrease to about a 45% decrease, about a 25% decrease to about a 40% decrease, about a 25% decrease to about a 35% decrease, about a 25% decrease to about a 30% decrease, about a 30% decrease to about a 99% decrease, about a 30% decrease to about a 95% decrease, about a 30% decrease to about a 90% decrease, about a 30% decrease to about a 85% decrease, about a 30% decrease to about a 80% decrease, about a 30% decrease to about a 75% decrease, about a 30% decrease to about a 70% decrease, about a 30% decrease to about a 65% decrease, about a 30% decrease to about a 60% decrease, about a 30% decrease to about a 55% decrease, about a 30% decrease to about a 50% decrease, about a 30% decrease to about a 45% decrease, about a 30% decrease to about a 40% decrease, about a 30% decrease to about a 35% decrease, about a 35% decrease to about a 99% decrease, about a 35% decrease to about a 95% decrease, about a 35% decrease to about a 90% decrease, about a 35% decrease to about a 85% decrease, about a 35% decrease to about a 80% decrease, about a 35% decrease to about a 75% decrease, about a 35% decrease to about a 70% decrease, about a 35% decrease to about a 65% decrease, about a 35% decrease to about a 60% decrease, about a 35% decrease to about a 55% decrease, about a 35% decrease to about a 50% decrease, about a 35% decrease to about a 45% decrease, about a 35% decrease to about a 40% decrease, about a 40% decrease to about a 99% decrease, about a 40% decrease to about a 95% decrease, about a 40% decrease to about a 90% decrease, about a 40% decrease to about a 85% decrease, about a 40% decrease to about a 80% decrease, about a 40% decrease to about a 75% decrease, about a 40% decrease to about a 70% decrease, about a 40% decrease to about a 65% decrease, about a 40% decrease to about a 60% decrease, about a 40% decrease to about a 55% decrease, about a 40% decrease to about a 50% decrease, about a 40% decrease to about a 45% decrease, about a 45% decrease to about a 99% decrease, about a 45% decrease to about a 95% decrease, about a 45% decrease to about a 90% decrease, about a 45% decrease to about a 85% decrease, about a 45% decrease to about a 80% decrease, about a 45% decrease to about a 75% decrease, about a 45% decrease to about a 70% decrease, about a 45% decrease to about a 65% decrease, about a 45% decrease to about a 60% decrease, about a 45% decrease to about a 55% decrease, about a 45% decrease to about a 50% decrease, about a 50% decrease to about a 99% decrease, about a 50% decrease to about a 95% decrease, about a 50% decrease to about a 90% decrease, about a 50% decrease to about a 85% decrease, about a 50% decrease to about a 80% decrease, about a 50% decrease to about a 75% decrease, about a 50% decrease to about a 70% decrease, about a 50% decrease to about a 65% decrease, about a 50% decrease to about a 60% decrease, about a 50% decrease to about a 55% decrease, about a 55% decrease to about a 99% decrease, about a 55% decrease to about a 95% decrease, about a 55% decrease to about a 90% decrease, about a 55% decrease to about a 85% decrease, about a 55% decrease to about a 80% decrease, about a 55% decrease to about a 75% decrease, about a 55% decrease to about a 70% decrease, about a 55% decrease to about a 65% decrease, about a 55% decrease to about a 60% decrease, about a 60% decrease to about a 99% decrease, about a 60% decrease to about a 95% decrease, about a 60% decrease to about a 90% decrease, about a 60% decrease to about a 85% decrease, about a 60% decrease to about a 80% decrease, about a 60% decrease to about a 75% decrease, about a 60% decrease to about a 70% decrease, about a 60% decrease to about a 65% decrease, about a 65% decrease to about a 99% decrease, about a 65% decrease to about a 95% decrease, about a 65% decrease to about a 90% decrease, about a 65% decrease to about a 85% decrease, about a 65% decrease to about a 80% decrease, about a 65% decrease to about a 75% decrease, about a 65% decrease to about a 70% decrease, about a 70% decrease to about a 99% decrease, about a 70% decrease to about a 95% decrease, about a 70% decrease to about a 90% decrease, about a 70% decrease to about a 85% decrease, about a 70% decrease to about a 80% decrease, about a 70% decrease to about a 75% decrease, about a 75% decrease to about a 99% decrease, about a 75% decrease to about a 95% decrease, about a 75% decrease to about a 90% decrease, about a 75% decrease to about a 85% decrease, about a 75% decrease to about a 80% decrease, about a 80% decrease to about a 99% decrease, about a 80% decrease to about a 95% decrease, about a 80% decrease to about a 90% decrease, about a 80% decrease to about a 85% decrease, about a 85% decrease to about a 99% decrease, about a 85% decrease to about a 95% decrease, about a 85% decrease to about a 90% decrease, about a 90% decrease to about a 99% decrease, about a 90% decrease to about a 95% decrease, or about a 95% decrease to about a 99% decrease) as compared to the half-life of a control ABPC (e.g., any of the exemplary control ABPCs described herein).

### Conjugation

[0597] In some embodiments, the ABPCs provided herein can be conjugated to a drug (e.g., a chemotherapeutic drug, a small molecule), a toxin, or a radioisotope. Non-limiting examples of drugs, toxins, and radioisotopes (e.g., known to be useful for the treatment of cancer) are known in the art.

[0598] In some embodiments, at least one polypeptide of any of the ABPCs described herein is conjugated to the toxin, the radioisotope, or the drug via a cleavable linker. In some embodiments, the cleavable linker includes a protease cleavage site. In some embodiments, the cleavable linker is cleaved on the ABPC once it is transported to the lysosome or late endosome by the target mammalian cell. In some embodiments, cleavage of the linker functionally activates the drug or toxin.

[0599] In some embodiments, at least one polypeptide of any of the ABPCs described herein is conjugated to the toxin, the radioisotope, or the drug via a non-cleavable linker. In some embodiments, the conjugated toxin, radioisotope, or drug is released during lysosomal and/or late endosomal degradation of the ABPC.

[0600] Non-limiting examples of cleavable linkers include: hydrazone linkers, peptide linkers, disulfide linkers, and thioether linkers. See, e.g., Carter et al., Cancer J. 14(3):154-169, 2008; Sanderson et al., Clin. Cancer Res. 11(2 Pt 1):843-852, 2005; Chari et al., Acc. Chem. Res. 41(1):98-107, 2008; Oflazoglu et al., Clin. Cancer Res. 14(19): 6171-6180, 2008; and Lu et al., Int. J. Mol. Sci. 17(4): 561, 2016.

[0601] Non-limiting examples of non-cleavable linkers include: maleimide alkane-linkers and maleimide cyclohexane linker (MMC) (see, e.g., those described in McCombs et al., AAPS J. 17(2):339-351, 2015).

[0602] In some embodiments, any of the ABPCs described herein is cytotoxic or cytostatic to the target mammalian cell.

### Expression of an Antigen-Binding Protein Construct in a Cell

[0603] Also provided herein are methods of generating a recombinant cell that expresses an ABPC (e.g., any of the ABPCs described herein) that include: introducing into a cell a nucleic acid encoding the ABPC to produce a recombinant cell; and culturing the recombinant cell under conditions sufficient for the expression of the ABPC. In some embodiments, the introducing step includes introducing into a cell an expression vector including a nucleic acid encoding the ABPC to produce a recombinant cell.

[0604] Any of the ABPCs described herein can be produced by any cell, e.g., a eukaryotic cell or a prokaryotic cell. As used herein, the term “eukaryotic cell” refers to a cell having a distinct, membrane-bound nucleus. Such cells may include, for example, mammalian (e.g., rodent, non-human primate, or human), insect, fungal, or plant cells. In some embodiments, the eukaryotic cell is a yeast cell, such as Saccharomyces cerevisiae. In some embodiments, the eukaryotic cell is a higher eukaryote, such as mammalian, avian, plant, or insect cells. As used herein, the term “prokaryotic cell” refers to a cell that does not have a distinct, membrane-bound nucleus. In some embodiments, the prokaryotic cell is a bacterial cell.

[0605] Methods of culturing cells are well known in the art. Cells can be maintained in vitro under conditions that favor proliferation, differentiation, and growth. Briefly, cells can be cultured by contacting a cell (e.g., any cell) with a cell culture medium that includes the necessary growth factors and supplements to support cell viability and growth.

[0606] Methods of introducing nucleic acids and expression vectors into a cell (e.g., a eukaryotic cell) are known in the art. Non-limiting examples of methods that can be used to introduce a nucleic acid into a cell include lipofection, transfection, electroporation, microinjection, calcium phosphate transfection, dendrimer-based transfection, cationic polymer transfection, cell squeezing, sonoporation, optical transfection, impalection, hydrodynamic delivery, magnetofection, viral transduction (e.g., adenoviral and lentiviral transduction), and nanoparticle transfection.

[0607] Provided herein are methods that further include isolation of the ABPCs from a cell (e.g., a eukaryotic cell) using techniques well-known in the art (e.g., ammonium sulfate precipitation, polyethylene glycol precipitation, ion-exchange chromatography (anion or cation), chromatography based on hydrophobic interaction, metal-affinity chromatography, ligand-affinity chromatography, and size exclusion chromatography).

### Methods of Treatment

[0608] Provided herein are methods of treating a cancer characterized by having a population of cancer cells that have CD22 or an epitope of CD22 presented on their surface, that include: administering a therapeutically effective amount of any of the pharmaceutical compositions described herein or any of the ABPCs described herein to a subject identified as having a cancer characterized by having the population of cancer cells.

[0609] Also provided herein are methods of reducing the volume of a tumor in a subject, wherein the tumor is characterized by having a population of cancer cells that have CD22 or an epitope of CD22 presented on their surface, that include: administering a therapeutically effective amount of any of the pharmaceutical compositions described herein or any of the ABPCs described herein to a subject identified as having a cancer characterized by having the population of cancer cells. In some embodiments of any of the methods described herein, the volume of at least one (e.g., 1, 2, 3, 4, or 5) tumor (e.g., solid tumor) or tumor location (e.g., a site of metastasis) is reduced (e.g., a detectable reduction) by at least 1%, at least 2%, at least 3%, at least 4%, at least 5%, at least 6%, at least 8%, at least 10%, at least 12%, at least 14%, at least 16%, at least 18%, at least 20%, at least 22%, at least 24%, at least 26%, at least 28%, at least 30%, at least 35%, at least 40%, at least 45%, at least 50%, at least 55%, at least 60%, at least 65%, at least 70%, at least 75%, at least 80%, at least 85%, at least 90%, at least 95%, or at least 99%) reduced as compared to the size of the at least one tumor (e.g., solid tumor) before administration of the ABPC.

[0610] Also provided herein are methods of inducing cell death in a cancer cell in a subject, wherein the cancer cell has CD22 or an epitope of CD22 presented on its surface, that include: administering a therapeutically effective amount of any of the pharmaceutical compositions of described herein or any of the ABPCs described herein to a subject identified as having a cancer characterized as having the population of cancer cells. In some embodiments, the cell death that is induced is necrosis. In some embodiments, the cell death that is induced is apoptosis.

[0611] In some embodiments of any of the methods described herein, the cancer is a primary tumor.

[0612] In some embodiments of any of the methods described herein, the cancer is a metastasis.

[0613] In some embodiments of any of the methods described herein, the cancer is a non-T-cell-infiltrating tumor. In some embodiments of any of the methods described herein, the cancer is a T-cell-infiltrating tumor.

[0614] Provided herein are methods of decreasing the risk of developing a metastasis or decreasing the risk of developing an additional metastasis in a subject having a cancer, wherein the cancer is characterized by having a population of cancer cells that have CD22 or an epitope of CD22 presented on their surface, that include: administering a therapeutically effective amount of any of the pharmaceutical compositions of described herein or any of the ABPCs described herein to a subject identified as having a cancer characterized as having the population of cancer cells. In some embodiments, the risk of developing a metastasis or the risk of developing an additional metastasis is decreased (e.g., a detectable decrease) by at least 1%, by at least 2%, at least 3%, at least 4%, at least 5%, at least 6%, at least 8%, at least 10%, at least 12%, at least 14%, at least 16%, at least 18%, at least 20%, at least 25%, at least 30%, at least 35%, at least 40%, at least 45%, at least 50%, at least 55%, at least 60%, at least 65%, at least 70%, at least 75%, at least 80%, at least 85%, at least 90%, at least 95%, or at least 99% in the subject as compared to the risk of a subject having a similar cancer, but administered no treatment or a treatment that does not include the administration of any of the ABPCs described herein.

[0615] In some embodiments of any of the methods described herein, the cancer is a non-T-cell-infiltrating tumor. In some embodiments of any of the methods described herein, the cancer is a T-cell-infiltrating tumor. In some embodiments of any of the methods described herein, the cellular compartment is part of the endosomal/lysosomal pathway. In some embodiments of any of the methods described herein, the cellular compartment is an endosome.

[0616] The term “subject” refers to any mammal. In some embodiments, the subject or “subject suitable for treatment” may be a canine (e.g., a dog), feline (e.g., a cat), equine (e.g., a horse), ovine, bovine, porcine, caprine, primate, e.g., a simian (e.g., a monkey (e.g., marmoset, baboon), or an ape (e.g., a gorilla, chimpanzee, orangutan, or gibbon) or a human; or rodent (e.g., a mouse, a guinea pig, a hamster, or a rat). In some embodiments, the subject or “subject suitable for treatment” may be a non-human mammal, especially mammals that are conventionally used as models for demonstrating therapeutic efficacy in humans (e.g., murine, lapine, porcine, canine or primate animals) may be employed.

[0617] As used herein, treating includes reducing the number, frequency, or severity of one or more (e.g., two, three, four, or five) signs or symptoms of a cancer in a patient having a cancer (e.g., any of the cancers described herein). For example, treatment can reducing cancer progression, reduce the severity of a cancer, or reduce the risk of re-occurrence of a cancer in a subject having the cancer.

[0618] Provided herein are methods of inhibiting the growth of a solid tumor in a subject (e.g., any of the subjects described herein) that include administering to the subject a therapeutically effective amount of any of the ABPCs described herein or any of the pharmaceutical compositions described herein (e.g., as compared to the growth of the solid tumor in the subject prior to treatment or the growth of a similar solid tumor in a different subject receiving a different treatment or receiving no treatment).

[0619] In some embodiments of any of the methods described herein, the growth of a solid tumor is primary growth of a solid tumor. In some embodiments of any of the methods described herein, the growth of a solid tumor is recurrent growth of a solid tumor. In some embodiments of any of the methods described herein, the growth of a solid tumor is metastatic growth of a solid tumor. In some embodiments, treatment results in about a 1% decrease to about 99% decrease (or any of the subranges of this range described herein) in the growth of a solid tumor in the subject (e.g., as compared to the growth of the solid tumor in the subject prior to treatment or the growth of a similar solid tumor in a different subject receiving a different treatment or receiving no treatment). The growth of a solid tumor in a subject can be assessed by a variety of different imaging methods, e.g., positron emission tomograph, X-ray computed tomography, computed axial tomography, and magnetic resonance imaging.

[0620] Also provided herein are methods of decreasing the risk of developing a metastasis or developing an additional metastasis over a period of time in a subject identified as having a cancer (e.g., any of the exemplary cancers described herein) that include administering to the subject a therapeutically effective amount of any of the proteins described herein or any of the pharmaceutical compositions described herein (e.g., as compared to a subject having a similar cancer and receiving a different treatment or receiving no treatment). In some embodiments of any of the methods described herein, the metastasis or additional metastasis is one or more to a bone, lymph nodes, brain, lung, liver, skin, chest wall including bone, cartilage and soft tissue, abdominal cavity, contralateral breast, soft tissue, muscle, bone marrow, ovaries, adrenal glands, and pancreas.

[0621] In some embodiments of any of the methods described herein, the period of time is about 1 month to about 3 years (e.g., about 1 month to about 2.5 years, about 1 month to about 2 years, about 2 months to about 1.5 years, about 1 month to about 1 year, about 1 month to about 10 months, about 1 month to about 8 months, about 1 month to about 6 months, about 1 month to about 5 months, about 1 month to about 4 months, about 1 month to about 3 months, about 1 month to about 2 months, about 2 months to about 3 years, about 2 months to about 2.5 years, about 2 months to about 2 years, about 2 months to about 1.5 years, about 2 months to about 1 year, about 2 months to about 10 months, about 2 months to about 8 months, about 2 months to about 6 months, about 2 months to about 5 months, about 2 months to about 4 months, about 2 months to about 3 months, about 3 months to about 3 years, about 3 months to about 2.5 years, about 3 months to about 2 years, about 3 months to about 1.5 years, about 3 months to about 1 year, about 3 months to about 10 months, about 3 months to about 8 months, about 3 months to about 6 months, about 3 months to about 5 months, about 3 months to about 4 months, about 4 months to about 3 years, about 4 months to about 2.5 years, about 4 months to about 2 years, about 4 months to about 1.5 years, about 4 months to about 1 year, about 4 months to about 10 months, about 4 months to about 8 months, about 4 months to about 6 months, about 4 months to about 5 months, about 5 months to about 3 years, about 5 months to about 2.5 years, about 5 months to about 2 years, about 5 months to about 1.5 years, about 5 months to about 1 year, about 5 months to about 10 months, about 5 months to about 8 months, about 5 months to about 6 months, about 6 months to about 3 years, about 6 months to about 2.5 years, about 6 months to about 2 years, about 6 months to about 1.5 years, about 6 months to about 1 year, about 6 months to about 10 months, about 6 months to about 8 months, about 8 months to about 3 years, about 8 months to about 2.5 years, about 8 months to about 2 years, about 8 months to about 1.5 years, about 8 months to about 1 year, about 8 months to about 10 months, about 10 months to about 3 years, about 10 months to about 2.5 years, about 10 months to about 2 years, about 10 months to about 1.5 years, about 10 months to about 1 year, about 1 year to about 3 years, about 1 year to about 2.5 years, about 1 year to about 2 years, about 1 year to about 1.5 years, about 1.5 years to about 3 years, about 1.5 years to about 2.5 years, about 1.5 years to about 2 years, about 2 years to about 3 years, about 2 years to about 2.5 years, or about 2.5 years to about 3 years).

[0622] In some embodiments, the risk of developing a metastasis or developing an additional metastasis over a period of time in a subject identified as having a cancer is decreased by about 1% to about 99% (e.g., or any of the subranges of this range described herein), e.g., as compared to the risk in a subject having a similar cancer receiving a different treatment or receiving no treatment.

[0623] Non-limiting examples of cancer include: acute lymphoblastic leukemia (ALL), acute myeloid leukemia (AML), adrenocortical carcinoma, anal cancer, appendix cancer, astrocytoma, basal cell carcinoma, brain tumor, bile duct cancer, bladder cancer, bone cancer, breast cancer, bronchial tumor, Burkitt Lymphoma, carcinoma of unknown primary origin, cardiac tumor, cervical cancer, chordoma, chronic lymphocytic leukemia (CLL), chronic myelogenous leukemia (CML), chronic myeloproliferative neoplasm, colon cancer, colorectal cancer, craniopharyngioma, cutaneous T-cell lymphoma, ductal carcinoma, embryonal tumor, endometrial cancer, ependymoma, esophageal cancer, esthesioneuroblastoma, fibrous histiocytoma, Ewing sarcoma, eye cancer, germ cell tumor, gallbladder cancer, gastric cancer, gastrointestinal carcinoid tumor, gastrointestinal stromal tumor, gestational trophoblastic disease, glioma, head and neck cancer, hairy cell leukemia, hepatocellular cancer, histiocytosis, Hodgkin lymphoma, hypopharyngeal cancer, intraocular melanoma, islet cell tumor, Kaposi sarcoma, kidney cancer, Langerhans cell histiocytosis, laryngeal cancer, leukemia, lip and oral cavity cancer, liver cancer, lobular carcinoma in situ, lung cancer, lymphoma, macroglobulinemia, malignant fibrous histiocytoma, melanoma, Merkel cell carcinoma, mesothelioma, metastatic squamous neck cancer with occult primary, midline tract carcinoma involving NUT gene, mouth cancer, multiple endocrine neoplasia syndrome, multiple myeloma, mycosis fungoides, myelodysplastic syndrome, myelodysplastic/myeloproliferative neoplasm, nasal cavity and para-nasal sinus cancer, nasopharyngeal cancer, neuroblastoma, non-Hodgkin lymphoma, non-small cell lung cancer, oropharyngeal cancer, osteosarcoma, ovarian cancer, pancreatic cancer, papillomatosis, paraganglioma, parathyroid cancer, penile cancer, pharyngeal cancer, pheochromocytomas, pituitary tumor, pleuropulmonary blastoma, primary central nervous system lymphoma, prostate cancer, rectal cancer, renal cell cancer, renal pelvis and ureter cancer, retinoblastoma, rhabdoid tumor, salivary gland cancer, Sezary syndrome, skin cancer, small cell lung cancer, small intestine cancer, soft tissue sarcoma, spinal cord tumor, stomach cancer, T-cell lymphoma, teratoid tumor, testicular cancer, throat cancer, thymoma and thymic carcinoma, thyroid cancer, urethral cancer, uterine cancer, vaginal cancer, vulvar cancer, and Wilms' tumor. Additional examples of cancer are known in the art.

[0624] In some embodiments, the patient is further administered one or more additional therapeutic agents (e.g., one or more of a chemotherapeutic agent, a recombinant cytokine or interleukin protein, a kinase inhibitor, and a checkpoint inhibitor). In some embodiments, the one or more additional therapeutic agents is administered to the patient at approximately the same time as any of the ABPCs described herein are administered to the patient. In some embodiments, the one or more additional therapeutic agents are administered to the patient after the administration of any of the ABPCs described herein to the patient. In some embodiments, the one or more additional therapeutic agents are administered to the patient before the administration of any of the ABPCs described herein to the patient.

[0625] In some embodiments of any of the methods described herein, the cancer is a solid cancer (e.g., breast cancer, prostate cancer, or non-small cell lung cancer).

### Compositions

[0626] Also provided herein are compositions (e.g., pharmaceutical compositions) that include at least one of any of the ABPCs described herein. In some embodiments, the compositions (e.g., pharmaceutical compositions) can be disposed in a sterile vial or a pre-loaded syringe.

[0627] In some embodiments, the compositions (e.g., pharmaceutical compositions) are formulated for different routes of administration (e.g., intravenous, subcutaneous, intramuscular, or intratumoral). In some embodiments, the compositions (e.g., pharmaceutical compositions) can include a pharmaceutically acceptable carrier (e.g., phosphate buffered saline). Single or multiple administrations of any of the pharmaceutical compositions described herein can be given to a subject depending on, for example: the dosage and frequency as required and tolerated by the patient. A dosage of the pharmaceutical composition should provide a sufficient quantity of the ABPC to effectively treat or ameliorate conditions, diseases, or symptoms.

[0628] Also provided herein are methods of treating a subject having a cancer (e.g., any of the cancers described herein) that include administering a therapeutically effective amount of at least one of any of the compositions or pharmaceutical compositions provided herein.

### Kits

[0629] Also provided herein are kits that include any of the ABPCs described herein, any of the compositions described herein, or any of the pharmaceutical compositions described herein. In some embodiments, the kits can include instructions for performing any of the methods described herein. In some embodiments, the kits can include at least one dose of any of the compositions (e.g., pharmaceutical compositions) described herein. In some embodiments, the kits can provide a syringe for administering any of the pharmaceutical compositions described herein.

### Protein Constructs

[0630] Also provided are protein constructs (PCs) that include: a first antigen-binding domain that is capable of specifically binding CD22 or an epitope of CD22 presented on the surface of a target mammalian cell, where: (a) the dissociation rate of the first antigen-binding domain at a pH of about 7.0 to about 8.0 (or any of the subranges of this range described herein) is faster than the dissociation rate at a pH of about 4.0 to about 6.5 (or any of the subranges of this range described herein); and/or (b) the dissociation constant (K_{D}) of the first antigen-binding domain at a pH of about 7.0 to about 8.0 (or any of the subranges of this range) is greater than the K_{D} at a pH of about 4.0 to about 6.5.

[0631] Also provided herein are pharmaceutical compositions including any of the PCs described herein. Also provided herein are methods of treating a subject in need thereof that include administering a therapeutically effective amount of any of the PCs described herein to the subject.

### Methods of Improving pH Dependence of an Antigen-Binding Protein Construct

[0632] Also provided herein are methods of improving pH dependence of an antigen-binding protein construct, the method comprises providing a starting antigen-binding protein construct comprising an antigen-binding domain and introducing one or more histidine amino acid substitutions into one or more CDRs of the antigen-binding domain in the starting antigen-binding protein construct, wherein the method results in the generation of an antigen-binding protein construct having one or both of: (a) an increased (e.g., at least a 0.1-fold increase to about a 100-fold increase, or any of the subranges of this range described herein) ratio of the dissociation rate of the antigen-binding domain at a pH of about 4.0 to about 6.5 to the dissociation rate at a pH of about 7.0 to about 8.0, as compared to the starting antigen-binding protein construct, and (b) an increased (e.g., at least a 0.1-fold increase to about a 100-fold increase, or any of the subranges of this range described herein) ratio the dissociation constant (K_{D}) of the antigen-binding domain at a pH of about 4.0 to about 6.5 to the K_{D} at a pH of about 7.0 to about 8.0, as compared to the starting antigen-binding protein construct.

[0633] The invention is further described in the following examples, which do not limit the scope of the invention described in the claims.

### EXAMPLES

### Example 1

### Generation of CD22 Binders and Engineering of pH Binding Dependence

[0634] pH-engineered ABPCs specific for CD22 are generated using two methods. In the first approach, published monoclonal antibodies against CD22 are used as a starting template for introduction of additional mutations that allow engineering of pH-dependent binding to CD22 and i) enhanced endolysosomal accumulation of a conjugated toxin, as well as ii) enhanced CD22 recycling to the cell surface. The second approach involves discovery of de novo ABPCs specific for CD22 via antibody display methods from naive libraries or libraries with defined CDR compositions and screening under conditions designed for selection of pH-engineered ABPCs specific for CD22. In either case, histidine residues play an important role in engineering pH-dependent binding proteins.

[0635] Histidine residues are at least partially protonated at a pH below 6.5 owing to its pKa of 6.0. Therefore, if a histidine side chain in an antigen-binding domain participates in an electrostatic binding interaction with its antigen it will start to turn positively charged at a pH at or below 6.5. This could either weaken or enhance the binding affinity of the interaction at a pH below 6.5, based on the corresponding charge of and interactions with the antigen epitope. Thus, systematic introduction of histidines into antibody complementarity determining regions (CDRs) in an antibody or other binder library (e.g., an scFv library) can be used to identify substitutions that will affect an antigen-binding domain's interaction with an antigen at lower pH values. The first approach therefore involves histidine-scanning of variable region sequences of published monoclonal antibodies to identify pH-dependent variants.

[0636] Multiple CD22-binding monoclonal antibodies have been described in the literature and can be used as a template for engineering pH-dependent binding (Kantarjian P H et al., The Lancet Oncology. 13(4), 403-411, 2012). Briefly, for a subset of the antibody sequences, CDRs in each chain are identified using the methods described by Kabat et al (Kabat et al. (1992) Sequences of Proteins of Immunological Interest (DIANE publishing) and IMGT (Lefranc M P (1999) “The IMGT unique numbering for Immunoglobulins, T cell receptors and Ig-like domains” The Immunologist 7, 132-136), and for each CDR, residues falling under either or both Kabat and IMGT CDR definitions were called as CDR residues. To engineer pH-dependent sequence variants, individual amino acid residues within the heavy chain and/or light chain CDRs are systematically substituted with a histidine, one at a time. In cases where the starting CDR residue is a histidine, it is mutated to an alanine. Antibody variants with only one histidine or alanine mutation in a heavy/light chain CDR are generated by co-transfection of Expi293 cells with a) one heavy chain or light chain sequence variant, and b) the corresponding starting ABPC (e.g., the starting CD22-binding monoclonal antibody) light chain or heavy chain, respectively, using methods known to the art. After allowing for a period of protein expression, cell culture supernatants are collected, quantified, and the pH dependence of the variant is evaluated using biolayer interferometry (BLI) or other methods known to the art. Briefly, cell culture supernatants are normalized to an antibody expression level of 50 μg/mL, and captured on an anti-human Fc sensor (Forte Bio). A baseline is established using 1× kinetics buffer (Forte Bio), and the sensor is associated with 100 nM of CD22 in 1× PBS at pH 7.4 for 300 sec to generate an association curve. In the dissociation phase, the antibody-antigen complex on the sensor is exposed to 1× PBS at either pH 5.5 or pH 7.4 for 300-500 sec. Association and dissociation phase curves are examined for the starting ABPC antibody and each corresponding antibody variant at pH 5.5 and pH 7.4 to inform on two criteria: a) enhanced dissociation (i.e., higher koff values) at pH 5.5 due to histidine or alanine substitution compared to the starting ABPC, and b) reduced dissociation at pH 7.4 (i.e., lower koff values) compared to pH 5.5 in the antibody variant itself and with the starting ABPC. Variants that show either enhanced dissociation at pH 5.5 or reduced dissociation at pH 7.4 or both are selected for further analysis. It is also noted that while some histidine and alanine mutations obliterate CD22 binding, others are tolerated with little (e.g., less than 1-fold change in KD or dissociation rate) or no change in CD22 binding kinetics. Especially because histidine is a large, positively charged amino acid, these histidine variants and alanine variants with no change are noted as positions that may tolerate a wide range of mutations and lead to antibodies with different sequence but similar binding properties, a designation that is not otherwise apparent. The variants selected for further analysis are expressed at a larger scale and purified using protein A affinity chromatography. Binding kinetics (kon and koff) of the purified starting ABPC and variant antibodies are measured at pH 5.5 and pH 7.4 using Biacore (GE Healthcare). The ratio of the antibody's rate of dissociation (koff at pH 7.4 divided by koff at pH 5.5) is also used as a quantitative assessment of pH-dependent binding; similarly, the dissociation constant KD is calculated at both pH 5.5 and pH 7.4 as koff divided by kon and the ratio of the antibody's dissociation constant (KD at pH 7.4 divided by KD at pH 5.5) is also used as a quantitative assessment of pH-dependent binding. Antibodies with a rate of dissociation ratio less than that of the starting ABPC and/or a dissociation constant ratio less than that of the starting ABPC are selected for further assessment of combinatorial substitutions. Favorable histidine and/or alanine amino acid positions can also be combined to enhance pH dependence; this can be done by, e.g., combinatorially or rationally combining histidine and/or alanine substitutions on a given heavy or light chain that individually improve pH dependence, by, e.g., combinatorially or rationally combining modified heavy and light chains such that histidine and/or alanine substitutions are present on both chains, or combinations thereof. Such combinatorial variants are generated and tested/analyzed for differential pH dependence using the methods and protocols described herein, or others known to the art. Antibody variants that have the lowest rate of dissociation ratios and/or dissociation constant ratios are selected as candidates for further analysis (hereafter referred to as “pH-engineered ABPCs specific for CD22”).

[0637] The second method for selection of pH-engineered ABPCs specific for CD22 involves either screening libraries to identify de novo pH-dependent ABPCs specific for CD22 or ABPCs that could serve as templates for engineering pH-dependent binding as described herein. Two types of libraries can be used for these selections: naive phage/yeast display antibody libraries (e.g., Fab, scFv, VHH, VL, or others known to the art) or phage/yeast display libraries where CDRs have been mutated to express a subset of amino acid residues. Libraries are screened against soluble recombinant CD22 extracellular domains using methods known to the art with positive selection for variants that bind weakly (e.g., are eluted from beads) at pH 5.0 and bind strongly (e.g., are bound to beads) at pH 7.4. Three rounds of selections are performed. The final round of binders are screened using ELISA for binding to human CD22 and cyno CD22 and mouse CD22 or via mean fluorescence intensity in flow cytometric analysis. If more binders with cyno or murine cross-reactivity are desired, the final selection round can instead be performed on cyno CD22 or murine CD22. Selected binding proteins are subcloned into mammalian expression vectors and expressed as either full IgG proteins or Fc fusions in Expi293 cells. BLI analysis is performed as described herein for selection of pH-dependent binder variants and confirmed using Biacore.

### Example 2

### In Vitro Demonstration of pH-Dependent Binding to CD22, pH-Dependent Release of CD22, Enhanced Endolysosomal Delivery in CD22+ Cells, and Increased CD22 Antigen Density in CD22+ Cells After Exposure to pH-Engineered ABPCs Specific for CD22 as Compared to Control ABPCs Specific for CD22

[0638] As discussed herein, pH-engineered ABPCs specific for CD22 exhibit the desirable property of decreased CD22 binding at acidic pH (e.g., pH 5.0, pH 5.5), but enhanced binding at higher pH (e.g., pH 7.4), which enhances their accumulation in endolysosomes under physiological conditions.

pH-Dependent Binding to CD22 on Cells

[0639] To demonstrate that pH-engineered ABPCs specific for CD22 binds cell surface CD22 at neutral pH, a cell surface binding assay is performed. A panel of human cells that are CD22+ is assembled (e.g., Ramos (ATCC, CRL-1596), Raji (ATCC, CCL-86), and Daudi (ATCC, CCL-213). Methods of identifying and quantifying gene expression (e.g., CD22) for a given cell line are known to the art, and include, e.g., consulting the Cancer Cell Line Encyclopedia (CCLE; https://portals.broadinstitute.org/ccle) to ascertain the expression level and/or mutation status of a given gene in a tumor cell line), rtPCR, microarray, or RNA-Seq analysis, or cell staining with antibodies known in the art (e.g. Human Siglec-2/CD22 Antibody (R&D Systems, Clone #219934, MAB1968, inotuzumab, pinatuzumab, TRPH-222, ADCT-602, 12C5, or 19A3) or Purified Anti-Human CD22 Antibody (Biolegend, Clone #HIB22, Cat #302502) for CD22). Cells are seeded at approximately 5-10,000 per well in 150 μL of pH 7.4 culture medium and incubated at 37° C. for 5 minutes at several doses (e.g., a two-fold dilution series) from 1 pM to 1 μM with one of the following antibodies: a known, control ABPC specific for CD22 (e.g., an antibody, inotuzumab, pinatuzumab, TRPH-222, ADCT-602, 12C5, or 19A3), the pH-engineered ABPC specific for CD22, and an appropriate negative isotype control mAb (e.g., Biolegend Purified Human IgG1 Isotype Control Recombinant Antibody, Cat #403501). Prior to the onset of the experiment, the binding properties of all antibodies are validated using methods known to the art. Following the 5 minute incubation, cells are fixed with 4% formaldehyde (20 min at room temperature) and incubated with an appropriate fluorophore-labeled secondary antibody (e.g., ThermoFisher Mouse anti-Human IgG1 Fc Secondary Antibody, Alexa Fluor 488, Cat #A-10631) for 60 minutes. Unbound reagents are washed with a series of PBS washes, and the cell panels are imaged using confocal microscopy. Upon analysis of the images, significant fluorescence can be observed on the surface of cells bound with the known, control ABPC specific for CD22 as well as the pH-engineered ABPC specific for CD22, but little surface binding can be observed for the isotype negative control. To isolate the effect of pH on surface binding, the same experiment is repeated twice, with the primary antibody incubation taking place at sequentially lower pH (e.g., pH 6.5 and 5.5 and 5.0). Analysis of the resulting confocal microscopy images can show significant fluorescence on the surface of cells bound with all mAbs tested, excepting the isotype negative control, and that this fluorescence decreases for the pH-engineered ABPC specific for CD22 as the pH decreases. Alternatively, cells are analyzed for mean fluorescent intensity by flow cytometry using methods known in the art. A dissociation constant KD on cells at neutral pH of the antibodies analyzed is determined by nonlinear regression methods known in the art (e.g., a Scatchard plot). Taken together, the results can show that the pH engineering process results in the creation of a pH-engineered ABPC specific for CD22 that is pH-dependent in its binding properties and that it more effectively binds at neutral pH as compared to more acidic pH. Other methods of assessing the pH dependence of the pH-engineered ABPCs specific for CD22 are known in the art and include, e.g., using flow cytometry to measure ABPC surface binding.

pH-Dependent Release of CD22 on Cells

[0640] To demonstrate that pH-engineered ABPCs specific for CD22 are capable of releasing CD22 at low pH after binding at a neutral pH, a variant of the cell surface binding assay described above is performed using methods known to the art (e.g., as generally described in Gera N. (2012) PLoS ONE 7(11): e48928). Briefly, an appropriate CD22+ cell line (passage number less than 25) is harvested and 50,000 cells per well are plated in a U-Bottomed 96-well microplate. Three conditions are tested; binding and secondary staining at pH 7.4, binding and secondary staining at pH 5.0, and binding at pH 7.4 followed by release at pH 5.0 for 30 minutes and secondary staining at pH 7.4. Both pH-engineered ABPCs specific for CD22 as well as a control ABPC specific for CD22 are tested. The cells are washed two times with 200 μL of FACS buffer (1× PBS containing 3% Fetal Bovine Serum) at either pH 7.4 or 5.0 depending on the condition being tested. The purified protein samples are diluted into FACS buffer of the appropriate pH and added to the cells and allowed to bind for one hour on ice. After incubation with the primary antibodies the pH 7.4 and pH 5.0 conditions are washed twice as before, and then 100 μl of secondary rat anti-human Fc AF488 (BioLegend 410706) or other appropriate antibody, diluted 1:50, or anti Myc-Tag mouse mAb-AF488 (Cell Signaling Technologies 2279S) diluted 1:50 is added in FACS buffer of the appropriate pH, and incubated for 30 minutes on ice. The pH 5.0 release condition is washed twice with FACS buffer pH 7.4 and then resuspended in 100 μl of FACS buffer pH 5.0 and incubated on ice for 30 minutes, followed by secondary staining in FACS buffer pH 7.4 as described for the other conditions. The plates are washed twice as before and resuspended in 1% paraformaldehyde in the appropriate FACS buffer to fix them for flow cytometry analysis. All conditions are read on a flow cytometer (Accuri C6, BD Biosciences). Binding is observed as a shift in the FLl signal (as a mean fluorescence intensity) versus secondary alone. Upon analysis of the data, it can be determined that both the pH-engineered ABPC specific for CD22 as well as the control ABPC specific for CD22 effectively bind the surface of CD22+ cells at neutral pH, but the pH-engineered ABPC specific for CD22 binds poorly at pH 5.0; similarly, it can be determined that the pH-engineered ABPC specific for CD22 binds effectively at pH 7.4, but then releases/unbinds CD22 at pH 5.0.

Enhanced Endolysosomal Delivery in CD22+ Cells of pH-Engineered ABPCs Specific for CD22 as Compared to Control ABPCs Specific for CD22 (pHrodo)

[0641] To verify and demonstrate that ABPCs specific for CD22 achieve endolysosomal localization following cellular uptake, an internalization assay is performed using methods known to the art (e.g., Mahmutefendic et al., Int. J. Biochem. Cell Bio., 2011). Briefly, as described herein, a panel of human cells that express CD22 highly is assembled using methods known to the art. Cells are plated, washed three times with PBS, and incubated at 37 degrees C. for 60 minutes in media at neutral pH, with added concentrations of 2 micrograms per milliliter of a known, control ABPC specific for CD22 (e.g., as described herein), the pH-engineered ABPC specific for CD22, and an appropriate negative isotype control mAb (e.g., as described herein). In a subset of cells, validation of antibody internalization and endosomal localization is performed using methods known to the art; e.g., cells are fixed in 4% formaldehyde as described herein, permeabilized using TWEEN 20 or other methods known to the art (Jamur M C et al (2010) Permeabilization of cell membranes, Methods Mol Biol. 588:63-6), additionally stained with an endosomal marker, e.g., a fluorescent RAB11 antibody (RAB11 Antibody, Alexa Fluor 488, 3H18L5, ABfinity™ Rabbit Monoclonal), stained with an appropriate fluorescently labeled anti-human secondary antibody (e.g., as described herein), and imaged using confocal fluorescence microscopy, as described herein. Analysis of the confocal images can be used to show that both the pH-engineered ABPC specific for CD22 as well as the control ABPC specific for CD22 are internalized and accumulate in the endolysosomes.

[0642] To demonstrate that pH-engineered ABPCs specific for CD22 achieve enhanced endolysosomal accumulation relative to a control ABPC specific for CD22, a pHrodo-based internalization assay is performed using both a known, control ABPC specific for CD22 (e.g., as described herein) as well as the pH-engineered ABPC specific for CD22. The assay makes use of pHrodo™ iFL (P36014, ThermoFisher), a dye whose fluorescence increases with decreasing pH, such that its level of fluorescence outside the cell at neutral pH is lower than its level of fluorescence inside the acidic pH environment of endolysosomes. Briefly, an appropriate CD22+ cell line (less than passage 25) is suspended in its recommended media (e.g., by cell banks or cell bank databases ATCC, DSMZ, or ExPASy Cellosaurus) and plated in a 24-well plate at a density of 2,000,000 cells/mL, 1 mL per well. While keeping the cells on ice, 1 mL of 2× pHrodo iFL-labeled antibody (prepared in accordance with the manufacturer's instructions) is added to each well, the well is pipetted/mixed five times, and the plate is incubated in a light-protected environment for 45 minutes, on ice. An identical but separate plate is also incubated on ice that is meant as a no-internalization negative control. Following this incubation, the experimental plate is moved to a 37 degree C. incubator, the negative control plate is kept on ice to slow or block internalization, and samples are taken at designated time points to create an internalization time course. Samples are placed into a U-bottom 96-well plate, and internalization is quenched via addition of 200 μL/well of ice-cold FACS buffer. The plates are spun down at 2000×g for 2 minutes, resuspended in 200 μL ice-cold FACS buffer, spun down again, and resuspended in FACS buffer a second time. Finally, the samples are loaded into a flow cytometer for read-out of cellular pHrodo fluorescence using excitation and emission wavelengths consistent with the excitation and emission maxima of the pHrodo iFL Red dye (566 nm and 590 nm, respectively). Upon completion of the flow cytometry experiment and analysis of the data, it can be observed that cells treated with the pH-engineered ABPC specific for CD22 have a higher pHrodo iFL signal relative to a known, control ABPC specific for CD22, indicating that pH-engineered ABPCs specific for CD22 achieve enhanced endolysosomal accumulation relative to a control ABPC specific for CD22.

[0643] Alternatively, to demonstrate that pH-engineered ABPCs specific for CD22 achieve enhanced endolysosomal accumulation relative to a control ABPC specific for CD22, a variation of the above-described experiment is performed. CD22+ cells are plated, washed three times with PBS, and incubated at 37 degrees C. for 60 minutes in media at neutral pH with added concentrations of 2 μg/mL of either pH-engineered ABPC specific for CD22 or control ABPC specific for CD22. Following incubation, cells are washed three times with PBS, fixed and permeabilized, and stained with a panel of appropriately selected antibodies that bind late endosomal markers as well as lysosomes (e.g., RAB7, and LAMP1; Cell Signaling Technology, Endosomal Marker Antibody Sampler Kit #12666; AbCam, Anti-LAMP2 antibody [GL2A7], ab13524). After primary antibody staining, cells are stained with an appropriate mixture of fluorescently labeled secondary antibodies (e.g., Goat Anti-Human IgG (H&L) Secondary Antibody (Alexa Fluor 647) Cat #A-21445, and Abcam Goat Anti-Rabbit IgG H&L (Alexa Fluor 488), Cat #ab150077), imaged using confocal fluorescence microscopy, and regions of co-localization of signal from CD22-specific antibodies and endosomal markers are visualized and quantified. Upon analysis of the data, it can be revealed that there is increased co-localization of endolysosomal and CD22-specific antibody signal in wells treated with the pH-engineered ABPCs specific for CD22 as compared to wells treated with control ABPC specific for CD22, and can thereby demonstrate that pH-engineered ABPCs specific for CD22 achieve enhanced endolysosomal accumulation relative to control ABPC specific for CD22.

Increased CD22 Antigen Density in CD22+ Cells After Exposure to pH-Engineered ABPCs Specific for CD22 as Compared to Control ABPCs Specific for CD22

[0644] To demonstrate that treatment of cells with the pH-engineered ABPCs specific for CD22 does not result in a detectable reduction of the level of CD22 on the surface of cells exposed to the pH-engineered ABPCs specific for CD22, or that said treatment results in less of a reduction of the level of CD22 on the surface of cells exposed to the pH-engineered ABPC specific for CD22 versus a control ABPC specific for CD22, an antigen density study is performed using flow cytometry. Briefly, 4.0×10\hat{ }5 cells that express CD22 are plated per well in a 96-well plate in 100 μL media. Cells are treated with a titration from 1 pM to 1 μM of i) pH-engineered ABPCs specific for CD22, ii) a first control ABPC specific for CD22, iii) an appropriate isotype control, and iv) an untreated control. Cells are incubated for 2 hours at 37° C., at which point all cells are incubated with 200 nM of a fluorophore-labeled second control ABPC specific for CD22 (e.g., as described herein) which has a different epitope (as determined by, e.g., competitive binding studies on cells) than either the first control ABPC specific for CD22 or the pH-engineered ABPCs specific for CD22 for 30 minutes at 4° C. Following this 30-minute incubation, the mean fluorescence intensity (MFI) of all cells is read out using, e.g., flow cytometry, using methods known to one of ordinary skill in the art. In parallel, a quantitative standard curve that can be used to quantify the presence of CD22 on the surface of treated cells as a function of MFI is generated using a commercially available quantification kit (e.g., BD Biosciences PE Phycoerythrin Fluorescence Quantitation Kit, catalog #340495); the quantitative standard curve is created by following the manufacturer's instructions. Other methods of determining the absolute number of CD22 on the cell surface are known in the art and include, e.g., use of radioisotopically labeled reagents. Upon analysis of the data, it can be revealed that at least one antibody concentration, cells treated with a control ABPC specific for CD22 experience a reduction of the level of CD22 on their surface, whereas cells treated with pH-engineered ABPCs specific for CD22 experience a significantly smaller reduction or no reduction at all, both relative to the isotype and untreated controls.

### Example 3

### Conjugation of pH-Engineered and Control ABPCs Specific for CD22 to Cytotoxic Drugs

[0645] An antigen-binding protein construct conjugate (ADC) is made comprising the CD22-binding IgG (hereafter, CD22-IgG) described herein linked to monomethyl auristatin E (MMAE) via a valine-citrulline (vc) linker (hereafter, CD22-IgG-DC). Conjugation of the antigen-binding protein construct with vcMMAE begins with a partial reduction of the CD22-IgG followed by reaction with maleimidocaproyl-Val-Cit-PABC-MMAE (vcMMAE). The CD22-IgG (20 mg/mL) is partially reduced by addition of TCEP (molar equivalents of TCEP:mAb is 2:1) followed by incubation at 0° C. overnight. The reduction reaction is then warmed to 20° C. To conjugate all of the thiols, vcMMAE is added to a final vcMMAE:reduced Cys molar ratio of 1:15. The conjugation reaction is carried out in the presence of 10% v/v of DMSO and allowed to proceed at 20° C. for 60 minutes.

[0646] After the conjugation reaction, excess free N(acetyl)-Cysteine (2 equivalents vs. vcMMAE charge) is added to quench unreacted vcMMAE to produce the Cys-Val-Cit-MMAE adduct. The Cys quenching reaction is allowed to proceed at 20° C. for approximately 30 minutes. The Cys-quenched reaction mixture is purified as per below. The above conjugation method can also be used to conjugate maleimidocaproyl monomethylauristatin F (mcMMAF) to an antigen-binding protein construct.

[0647] The CD22-IgG-DC is purified using a batch purification method. The reaction mixture is treated with the appropriate amount of water washed Bu-HIC resin (ToyoPearl; Tosoh Biosciences), i.e., seven weights of resin is added to the mixture. The resin/reaction mixture is stirred for the appropriate time, and monitored by analytical hydrophobic interaction chromatography for removal of drug conjugate products, filtered through a coarse polypropylene filter, and washed by two bed volumes of a buffer (0.28 M sodium chloride, 7 mM potassium phosphate, pH 7). The combined filtrate and rinses are combined and analyzed for product profile by HIC HPLC. The combined filtrate and rinses are buffer exchanged by ultrafiltration/diafiltration (UF/DF) to 15 mM histidine, pH 6 with 10 diavolumes 15 nM histidine buffer.

[0648] A similar protocol can be used to conjugate DNA toxins such as SG3249 and SGD-1910 to CD22-IgG (see Tiberghien A C et al (2016) Design and Synthesis of Tesirine, a Clinical Antibody—Drug Conjugate Pyrrolobenzodiazepine Dimer Payload, ACS Med Chem Lett 7:983-987). Briefly, for SG3249, CD22-IgG (15 mg, 100 nanomoles) is diluted into 13.5 mL of a reduction buffer containing 10 mM sodium borate pH 8.4, 2.5 mM EDTA and a final antibody concentration of 1.11 mg/mL. A 10 mM solution of TCEP is added (1.5 molar equivalent/antibody, 150 nanomoles, 15 microliters) and the reduction mixture is heated at +37° C. for 1.5 hours in an incubator. After cooling down to room temperature, SG3249 is added as a DMSO solution (5 molar equivalent/antibody, 500 nanomoles, in 1.5 mL DMSO). The solution is mixed for 1.25 hours at room temperature, then the conjugation is quenched by addition of N-acetyl cysteine (1 micromole, 100 microliters at 10 mM), and injected into an AKTA™ Pure FPLC using a GE Healthcare HiLoad™ 26/600 column packed with Superdex 200 PG, and eluted with 2.6 mL/min of sterile-filtered phosphate-buffered saline (PBS). Fractions corresponding to the CD22-IgG-DC monomer peak are pooled, concentrated using a 15 mL Amicon Ultracell 50 KDa MWCO spin filter, analysed and sterile-filtered. UHPLC analysis on a Shimadzu Prominence system using a Phenomenex Aeris 3.6u XB-C18 150×2.1 mm column eluting with a gradient of water and acetonitrile on a reduced sample of CD22-IgG-DC at 280 nm and 330 nm (SG3249 specific) can show a mixture of light and heavy chains attached to several molecules of SG3249, consistent with a drug-per-antibody ratio (DAR) of 1 to 4 molecules of SG3249 per antibody. UHPLC analysis on a Shimadzu Prominence system using a Phenomenex Yarra 3u SEC-3000 300 mm×4.60 mm column eluting with sterile-filtered SEC buffer containing 200 mM potassium phosphate pH 6.95, 250 mM potassium chloride and 10% isopropanol (v/v) on a sample of CD22-IgG-DC at 280 nm can show a monomer purity of over 90% with no impurity detected. UHPLC SEC analysis allows determination of final CD22-IgG-DC yield of greater than 30%.

[0649] Alternatively, methods to conjugate toxins to antibodies via lysine residues are known in the art (e.g., see Catcott K C et al (2016) Microscale screening of antibody libraries as maytansinoid antibody-drug conjugates, MAbs 8:513-23). In addition, similar methods to the above can be used to conjugate drugs and toxins to non-IgG formats with disulfide bonds, such as Vh-Fcs.

### Example 4

### Demonstration of Enhanced Cytotoxicity of pH-Engineered ABPC ADCs Specific for CD22 in CD22+ Cells as Compared to a Control ABPC ADC Specific for CD22

[0650] The cytotoxic activity of both pH-engineered ADCs specific for CD22 (e.g., a pH-engineered CD22-IgG-DC) and control ABPC ADCs specific for CD22 (e.g., a control ABPC CD22-IgG-DC) are separately evaluated on a panel of CD22+ cell lines expressing a variety of antigen densities (e.g., as described herein) and a CD22− cell line (e.g K-562, ATCC, CCL-243), selected using the methods described herein, and, optionally, cells expressing transgenic CD22, e.g., HEK293 cells transfected with CD22 using methods known in the art (e.g., Expi293™ Expression System Kit ThermoFisher Catalog number: A14635). For purposes of validation, prior to use, all cell lines are tested for expression of CD22 using methods known to the art, e.g., qPCR, flow cytometry, mRNA RPKM, and antibody staining using anti-CD22 antibodies known to the art (e.g., as described herein) followed by visualization of the stain using fluorescence microscopy, immunohistochemistry, flow cytometry, ELISA, or other methods known to the art. To evaluate the cytotoxicity of compounds, cells are seeded at approximately 10-40,000 per well in 150 microliters of culture medium, then treated with graded doses of compounds from 1pM to 1 μM in quadruplicates at the initiation of the assay. Cytotoxicity assays are carried out for 96 hours after addition of test compounds. Fifty microliters of resazurin dye are added to each well during the last 4 to 6 hours of the incubation to assess viable cells at the end of culture. Dye reduction is determined by fluorescence spectrometry using the excitation and emission wavelengths of 535 nm and 590 nm, respectively. For analysis, the extent of resazurin reduction by the treated cells is compared to that of untreated control cells, and percent cytotoxicity is determined. Alternatively, a WST-8 kit is used to measure cytotoxicity per the manufacturer's instructions (e.g., Dojindo Molecular Technologies Catalog #CCK-8). IC50, the concentration at which half-maximal killing is observed, is calculated using curve-fitting methods known in the art. Upon analysis of the data, it can be determined that pH-engineered and control ABPC ADCs specific for CD22 are substantially cytotoxic to one or more CD22+ cell line, but less toxic to CD22− cells. It also can be determined that pH-engineered ADCs specific for CD22 are more cytotoxic to one or more CD22+ cell lines than control ABPC ADCs specific for CD22 because: a) they show greater depth of killing at one or more concentrations or, b) they show lower IC50 or, c) they show a greater ratio of their dissociation constant KD on cells at neutral pH (as described herein) divided by their IC50 on those same cells.

[0651] Additionally, the cytotoxic activity of ABPCs specific for CD22 can be measured in a secondary ADC assay. Secondary ADC assays are known in the art (e.g., Moradec Cat #αHFc-NC-MMAF and Cat #αHFc-CL-MMAE, and associated manufacturer's instructions). Briefly, the assay is carried out as in the previous paragraph, except the ABPC specific for CD22 is substituted for the ADC specific for CD22, and to evaluate the cytotoxicity of compounds, cells are seeded at approximately 10-40,000 per well in 150 microliters of culture medium, then treated with graded doses of ABPC specific for CD22 from 1 pM to 1 μM (final concentration in culture medium, having been pre-mixed with 100 nM, final concentration in culture medium, of Moradec Cat #αHFc-NC-MMAF secondary ADC reagent and pre-incubated at 37° C. for 30 min before addition of the mixture to the culture medium) in quadruplicates at the initiation of the assay.

[0652] The cytotoxic activity of pH-engineered ADCs specific for CD22 and control ABPC ADCs specific for CD22 conjugates, as well as ABPCs specific for CD22 in a secondary ADC assay, are additionally measured by a cell proliferation assay employing the following protocol (Promega Corp. Technical Bulletin TB288; Mendoza et al., Cancer Res. 62:5485-5488, 2002):
[0653] 1. An aliquot of 100 microliters of cell culture containing about 104 cells (e.g., CD22+ cells as described herein) in medium is deposited in each well of a 96-well, opaque-walled plate.
[0654] 2. Control wells are prepared containing medium and without cells.
[0655] 3. ADC specific for CD22 is added to the experimental wells at a range of concentrations from 1 pM-1 uM and incubated for 1-5 days. Alternatively, in a secondary ADC assay, 100 nM secondary ADC reagent (final concentration in culture medium, Moradec Cat #αHFc-NC-MMAF) and ABPC specific for CD22 at a range of concentrations from 1 pM-1 uM (final concentration in culture medium) are pre-mixed and pre-incubated at 37° C. for 30 min before addition of the mixture to the culture medium, and incubated for 1-5 days.
[0656] 4. The plates are equilibrated to room temperature for approximately 30 minutes.
[0657] 5. A volume of CellTiter-Glo Reagent equal to the volume of cell culture medium present in each well is added.
[0658] 6. The contents are mixed for 2 minutes on an orbital shaker to induce cell lysis.
[0659] 7. The plate is incubated at room temperature for 10 minutes to stabilize the luminescence signal.
[0660] 8. Luminescence is recorded and reported in graphs as RLU=relative luminescence units.

### Example 5

### Demonstration of Enhanced Toxin Liberation of pH-Engineered ABPC ADCs Specific for CD22 in CD22+ Cells as Compared to a Control ABPC ADC Specific for CD22

[0661] The pH-engineered ADCs specific for CD22 (e.g., a pH-engineered CD22-IgG-DC) can also demonstrate increased toxin liberation in CD22+ cells as compared to a control ABPC ADC specific for CD22 (e.g., a control ABPC CD22-IgG-DC). After treatment of CD22+ cells with pH-engineered and control ABPC ADCs specific for CD22 as described herein, an LC-MS/MS method is used to quantify unconjugated (i.e., liberated) MMAE in treated CD22+ cells (Singh, A. P. and Shah, D. K. Drug Metabolism and Disposition 45.11 (2017): 1120-1132.) An LC-MS/MS system with electrospray interphase and triple quadrupole mass spectrometer is used. For the detection of MMAE, a XBridge BEH Amide column (Waters, Milford, Mass.) is used with mobile phase A as water (with 5 mM ammonium formate and 0.1% formic acid) and mobile phase B as 95:5 acetonitrile/water (with 0.1% formic acid and 1 mM ammonium formate), using a gradient at a flow rate of 0.25 mL/min at 40° C. The total duration of the chromatographic run is 12 minutes, where two MRM scans (718.5/686.5 and 718.5/152.1 amu) are monitored. Deuterated (d8) MMAE (MCE MedChem Express, Monmouth Junction, N.J.) is used as an internal standard. First, an equation for quantifying unconjugated MMAE in a biological sample is derived by dividing the peak area for each drug standard by the peak area obtained for the internal standard. The resultant peak area ratios are then plotted as a function of the standard concentrations, and data points are fitted to the curve using linear regression. Three QC samples are included in the low, middle, and upper ranges of the standard curve to assess the predictive capability of the developed standard curve. The standard curves obtained are then used to deduce the observed concentrations of MMAE in a biologic sample. For measurement of MMAE concentration, treated cell samples are pelleted and reconstituted in fresh media to a final concentration of 0.25 million cells/100 μL. Samples are spiked with d8-MMAE (1 ng/mL) before performing cell lysis by the addition of a 2-fold volume of ice-cold methanol followed by freeze-thaw cycle of 45 minutes at −20° C. The final cell lysate is obtained by centrifuging the samples at 13,000 rpm for 15 minutes at 4° C. followed by collection of supernatant. For the preparation of standards and QC samples, a fresh cell suspension (0.25 million/100 μl) is spiked with known concentrations of MMAE and internal standard (d8-MMAE) before a procedure similar to the cell lysis mentioned above. The resulting cell lysates are then evaporated and reconstituted in mobile phase B before injection into LC-MS/MS. The concentration of unconjugated MMAE in lysates of CD22+ cells treated with pH-engineered ADCs specific for CD22 is observed to be greater than that in CD22+ cells treated with control ABPC ADC specific for CD22.

[0662] For tubulin-inhibiting toxins, toxin liberation is also assessed by monitoring of cell viability and cell cycle phase. ˜2.0×10\hat{ }5 CD22+ cells are plated in a 96-well flat bottom plate and treated with pH-engineered and control ABPC ADCs specific for CD22 as described herein. After treatment, cells are transferred to a 96-round bottom plate, and the plate is centrifuged at 400 rcf for 2 min to decant supernatant. Decanted cells are stained with Live/Dead eFluor 660. Cells are then centrifuged and washed with FACS buffer (PBS with 2% FBS), after which cell cycle distribution is analyzed with a BD Cycletest™ Plus DNA Kit (cat #340242). Briefly, cells are re-suspended in 76 ul Solution A and incubated for 10 min at room temperature. 61 μL Solution B is then added, and cells are incubated for another 10 min at room temperature. Finally, 61 μL of cold Solution C is added, and cells are again incubated for 10 min at room temp. Immediately after the last incubation step, cells are analyzed by flow cytometry (without washing) at a flow rate of 10 μL/sec. Increased G2/M-phase arrest can be observed with exposure to pH-engineered ADCs specific for CD22 as compared to control ABPC ADC specific for CD22.

[0663] For DNA-damaging toxins (e.g., pyrrolobenzodiazepine or “PBD”), DNA damage is assessed by measuring the phosphorylated histone H2AX (γH2AX). H2AX is normally phosphorylated in response to double-strand breaks in DNA; however, increased levels γH2AX may also be observed as a result of treatment with DNA-cross-linking toxins such as PBD or cisplatin (Huang, X. et al. 2004, Cytometry Part A 58A, 99-110). CD22+ cells are treated with pH-engineered and control ABPC ADCs specific for CD22 as described herein. After treatment, cells are rinsed with PBS, and then fixed in suspension in 1% methanol-free formaldehyde (Polysciences, Warrington, Pa.) in PBS at 0° C. for 15 min. Cells are resuspended in 70% ethanol for at least 2 h at −20° C. Cells are then washed twice in PBS and suspended in 0.2% Triton X-100 (Sigma) in a 1% (w/v) solution of BSA (Sigma) in PBS for 30 min to suppress nonspecific Ab binding. Cells are centrifuged again (200 g, 5 min) and the cell pellet is suspended in 100 μL of 1% BSA containing 1:800 diluted anti-histone γH2AX polyclonal Ab (Trevigen, Gaithersburg, Md.). The cells are then incubated overnight at 4° C., washed twice with PBS, and resuspended in 100 μL of 1:30 diluted FITC-conjugated F(ab′)2 fragment of swine anti-rabbit immunoglobulin (DAKO, Carpinteria, Calif.) for 30 min at room temperature in the dark. The cells are then counterstained with 5 μg/mL of PI (Molecular Probes, Eugene, Oreg.) dissolved in PBS containing 100 μg/mL of DNase-free RNase A (Sigma), for 20 min at room temperature. Cellular fluorescence of the FITC γH2AX signal and the PI counterstain are measured using flow cytometry using methods known in the art. When comparing cells within the same stage of the cell cycle (based on total DNA content), treated CD22+ cells can be observed to have an increased FITC γH2AX signal relative to untreated CD22+ cells (which serve as a baseline). Furthermore, CD22+ cells treated with pH-engineered ADCs specific for CD22 can be observed to have a greater increase in levels of γH2AX over baseline than cells treated with a control ABPC ADC specific for CD22. In addition to the γH2AX assay, DNA cross-linking can be more directly assessed with a Comet assay (Chandna, S. (2004) Cytometry 61A, 127-133).

[0664] In addition, as disclosed herein, pH-engineered and control ABPCs can be assayed using the methods in this example without direct conjugation by performing a secondary ADC assay instead of using primary conjugated ADCs.

### Example 6

### Demonstration of Decreased Half-Life of pH-Engineered ABPCs Specific for CD22 as Compared to a Control ABPC Specific for CD22

[0665] One of the surprising aspects of the pH-engineered ABPCs specific for CD22 described by the invention can be their ability to facilitate increased dissociation of ABPCs from the CD22 within the endosome or lysosome resulting in a decreased serum half-life relative to control ABPCs specific for CD22 or ABPCs that are not specific for CD22. This decreased serum half-life is due to the enhanced frequency with which pH-engineered ABPCs specific for CD22 are cleared from circulation due to their enhanced cellular internalization once bound to CD22, which over time can be observed through a decrease in serum concentration of unbound pH-engineered ABPC specific for CD22. To demonstrate these properties, a series of animal studies in mice and/or monkeys is performed using pH-engineered ABPC specific for CD22 and control ABPC specific for CD22 using methods known to the art (e.g., Gupta, P., et al. (2016), mAbs, 8:5, 991-997). Briefly, to conduct mouse studies, a single intravenous bolus (e.g., 5 mg/kg) of either pH-engineered ABPC specific for CD22 or control ABPC specific for CD22 is administered via tail vein to two groups of NOD SCID mice (e.g. Jackson Labs NOD.CB17-Prkdcscid/J Stock No: 001303) xenografted with a CD22+ cell line (e.g., as described herein). Xenografted mice are prepared by growing 1-5 million CD22+ cells in vitro and inoculating subcutaneously into the right flank of the mouse. Tumors are size matched at 300 mm3. Measurements of the length (L) and width (W) of the tumors are taken via electronic caliper and the volume is calculated according to the following equation: V=L×W\hat{ }2/2. Blood samples are collected via retro-orbital bleeds from each group at each of the following time points: 15 m, 30 m, 1 h, 8 h, 24 h, and 3 d, 7 d, 10 d, 14 d, 17 d, 21 d, and 28 d. Samples are processed to collect serum, and antibody concentrations are quantified using ELISA or other methods known to the art (e.g., PAC assay or MAC assay; Fischer, S. K. et al. (2012), mAbs, 4:5, 623-631, utilizing, e.g., anti-human Fc antibody Jackson ImmunoResearch Labs, Cat #109-006-006). Antibody concentrations of pH-engineered ABPC specific for CD22 and control ABPC specific for CD22 are plotted as a function of time. Upon analysis of the data, it can be observed that the pH-engineered ABPC specific for CD22 has a significantly shorter serum half-life relative to control ABPC specific for CD22, thereby demonstrating the ability of the pH-engineered ABPC specific for CD22's pH dependence to facilitate an enhanced dissociation within the endosome or lysosome relative to other, similar binders (e.g., control ABPC specific for CD22) that bind the same antigen but that differ in their pH dependence. If the pH-engineered and control ABPCs specific for CD22 are cross-reactive with the mouse homolog of CD22, a similar experiment can be repeated with non-xenografted mice.

[0666] Optionally, if the pH-engineered and control ABPCs specific for CD22 are cross-reactive with the cynomolgus monkey homolog of CD22, a similar experiment can be performed on monkeys (e.g., cynomolgus monkeys). An equal number of male and female monkeys (e.g., n=1-2 each) are administered a bolus of either pH-engineered ABPC specific for CD22 or control ABPC specific for CD22 at a dose of, e.g., 1 mg/kg via saphenous vein injection. Alternatively, several different doses of CD22-binding protein are administered across a group of several monkeys. Blood samples are collected via the peripheral vein or femoral vein at intervals similar to those described above, and analyzed for the presence of either pH-engineered ABPC specific for CD22 or control ABPC specific for CD22 using methods known to the art (e.g., ELISA). Upon analysis of the data, it can be observed that pH-engineered ABPC specific for CD22 has a significantly shorter serum half-life relative to control ABPC specific for CD22, thereby demonstrating the ability of pH-engineered ABPC specific for CD22 to facilitate an enhanced dissociation within the endosome or lysosome relative to other, similar binders (e.g., control ABPC specific for CD22) that bind the same antigen but that differ in their pH dependence. In some cases, this effect is observed only in certain doses, whereas in others it is observed across doses.

[0667] In addition, the half life of pH-engineered and control ABPC ADCs specific for CD22 can be assessed using the above methods by substituting pH-engineered and control ABPC ADCs specific for CD22 for the pH-engineered and control ABPCs specific for CD22 (i.e., studying the ABPCs after conjugation to a drug or toxin, as described herein).

### Example 7

### Increased Potency of pH-Engineered ADCs Specific for CD22 vs. a Control ABPC ADC Specific for CD22 in Mouse Xenograft Models

[0668] The enhanced anti-tumor activity of the pH-engineered ADCs specific for CD22 against CD22+ tumors can be demonstrated in a subcutaneous xenograft model of CD22+ cells. For the experiments, 1-5 million CD22+ cells are grown in vitro and inoculated subcutaneously per mouse into the right flank of female immunodeficient (e.g., SCID-Beige or NOD scid) mice. Tumors are size matched at 100-200 mm3, and dosed intraperitoneally (IP) (1 dose given every ˜4-7 days for a total of ˜2-6 doses). Measurements of the length (L) and width (W) of the tumors are taken via electronic caliper and the volume is calculated according to the following equation: V=L×W\hat{ }2/2. A bolus (e.g., 5 mg/kg) of either pH-engineered ADC specific for CD22 or control ABPC ADC specific for CD22 is administered via tail vein. Tumor growth inhibition (TGD and tumor growth delay (TGD) and survival are significantly improved with administration of pH-engineered ADC specific for CD22 compared to administration of control ABPC ADC specific for CD22 at the same regimen.

[0669] Optionally, spread of tumor cells into the various tissues is determined in sacrificed animals. Metastasis is measured according to Schneider, T., et al., Clin. Exp. Metas. 19 (2002) 571-582. Briefly, tissues are harvested and human Alu sequences are quantified by real-time PCR. Higher human DNA levels, quantified by real-time PCR, correspond to higher levels of metastasis. Levels of human Alu sequences (correlating to invasion of tumor cells into secondary tissue) are significantly lower in animals treated with pH-engineered ADC specific for CD22, corresponding to reduced metastasis, compared to mice treated with control ABPC ADC specific for CD22 at the same regimen. Alternatively, the enhanced anti-tumor activity of the pH-engineered ADC specific for CD22 can be shown in CD22+ patient-derived xenograft models (e.g., available from Crown Bio).

### Example 8

### Creation of a pH-Engineered Bispecific CD22 Bispecific ABPC and Demonstration of Exemplary Properties as Compared to a Control Bispecific ABPC

[0670] To create a pH-engineered ABPC specific for CD22 with modified toxicity and internalization properties, a bispecific antibody that binds two different epitopes on CD22 is constructed. It is known in the art that biparatopic antibodies can show increased antigen-dependent internalization, and are therefore useful for applications such as antibody-drug conjugates (e.g., see Li et al (2016) A Biparatopic HER2-Targeting Antibody-Drug Conjugate Induces Tumor Regression in Primary Models Refractory to or Ineligible for HER2-Targeted Therapy, Cancer Cell 29:117-29). Briefly, a pH-engineered CD22×CD22 bispecific, biparatopic ABPC specific for CD22 is assembled using light chain/heavy chain pairs from two different pH-engineered ABPCs specific for CD22, each of which binds a distinct epitope on CD22 that does not overlap with the other epitope. A set of pH-engineered ABPCs specific for CD22 that bind non-overlapping epitopes are discovered, e.g., using the methods described herein, or others known to one of ordinary skill in the art. Briefly, two binders are selected on the basis that they bind substantially different epitopes on CD22, as determined by, e.g., a binding competition assay as in Abdiche Y N et al (2009) Exploring blocking assays using Octet, ProteOn, and Biacore biosensors, Anal Biochem 386:172-80. Alternatively, briefly, as described herein, cell culture supernatants of cells transfected with a first ABPC specific for CD22 are normalized to an antibody expression level of 50 μg/mL, and captured on an anti-human Fc sensor (Forte Bio). A baseline is established using 1× kinetics buffer (Forte Bio), and the sensor is associated with 50 nM of CD22 in 1× PBS (that has been mixed and pre-incubated for 30 min at 37 degrees C. with a second ABPC specific for CD22 transfection supernatant or the first ABPC specific for CD22 transfection supernatant, both normalized to 50 ug/mL) at pH 7.4 for 300 sec to generate an association curve. If the association rate in the presence of the second ABPC specific for CD22 is significantly faster (as calculated by the instrument software, or as seen by an elevated level of association over time) than the association rate in the presence of the first ABPC specific for CD22, then the second ABPC specific for CD22 is deemed to bind a non-overlapping epitope of CD22. Optionally, each antibody is screened for its internazation properties when bound to its epitope on a cell expressing CD22, and well-internalizing antibodies are selected. Assays for determining the internalization rate of a molecule present on the surface of a cell are known to the art. See, e.g., Wiley et al. (1991) J. Biol. Chem. 266: 11083-11094; and Sorkin and Duex (2010) Curr. Protoc. Cell Biol. Chapter, Unit—15.14; Vainshtein et al. (2015) Pharm Res. 32: 286-299. Once selected, heavy and light chain constructs with engineered mutations for heavy and light chain pairing (Spiess et al., “Alternative molecular formats and therapeutic applications of bispecific antibodies,” 2015) are synthesized for both arms. Bispecific ABPCs specific for CD22 are produced by co-expression of corresponding heavy and light chain plasmids in, e.g., Expi293 cells. Cell culture supernatants are harvested and subjected to Protein A purification. Heterodimeric ABPCs specific for CD22 are separated from homodimeric species via additional purification steps such as ion exchange chromatography, hydrophobic interaction chromatography, and mixed mode chromatography. The purified pH-engineered CD22×CD22 bispecific, biparatopic ABPCs specific for CD22 are characterized via mass spectrometry to confirm the purity and absence of homodimeric species and size exclusion chromatography to confirm the presence of monomeric antigen-binding protein construct species. For the product antibody, binding to the CD22 is confirmed via Biacore analysis. Other methods of bispecific antibody production are known to the art and could also be used to create a bispecific antibody, e.g., the CD22×CD22 bispecific, biparatopic ABPCs specific for CD22 described herein (e.g., Labrijn et al (2014) “Controlled Fab-arm exchange for the generation of stable bispecific IgG1” Nature Protocols 9:2450-2463, accessed at http://www.nature.com/nprot/journal/v9/n10/abs/nprot.2014.169.html), as would be apparent to one of ordinary skill in the art. Alternatively, instead of a CD22×CD22 ABPC specific for CD22, a pH-engineered CD22×BINDER ABPC specific for CD22 can be constructed using similar methods apparent to one skilled in the art, where BINDER is any antibody that has been published in the art or discovered using methods like those herein or those known in the art (e.g., display-based or immunization-based methods).

[0671] Next, exemplary properties of pH-engineered CD22×CD22 ABPCs specific for CD22 can be demonstrated using the methods described herein, with the appropriate control being a control ABPC monospecific or bispecific ABPC specific for CD22. Briefly, it can be shown that, as compared to a control, the pH-engineered CD22×CD22 ABPCs specific for CD22: a) bind in a pH-dependent manner to cells, e.g., bind at a neutral pH but not an acidic pH and b) release from cells in a pH-dependent manner, e.g. bind at a neutral pH and release at an acidic pH and c) show enhanced endolysosomal accumulation in CD22+ cells and d) show increased CD22 antigen density after exposure to CD22+ cells and e) when conjugated to a toxin, show increased cytotoxicity to CD22+ cells and f) when conjugated to a toxin, show increased toxin liberation when incubated with CD22+ cells and g) show decreased half life when exposed to CD22 antigen in a relevant animal model and h) when conjugated to a toxin, show increased efficacy in a mouse xenograft model of CD22+ cells. Similarly, the exemplary properties of pH-engineered CD22×BINDER ABPCs specific for CD22 can be demonstrated using the methods described herein, with the appropriate control being a control ABPC CD22×BINDER bispecific ABPC specific for CD22.

### Example 9

### Construction and Screening of pH-Engineered CD22 ABPCs

[0672] Multiple CD22-binding monoclonal antibodies have been described in the literature and can be used as a template for engineering pH-dependent binding (Dijoseph J F et al. (2007) Leukemia, 21(11), 2240-2245). We selected inotuzumab (Heavy chain SEQ ID NO: 1, Light chain SEQ ID NO: 2) as a CD22-binding monoclonal antibody for pH engineering via histidine scanning. Briefly, CDRs in the heavy chain were identified using the methods described by Kabat et al (Kabat et al. (1992) Sequences of Proteins of Immunological Interest, DIANE publishing) and IMGT (Lefranc M P (1999) “The IMGT unique numbering for Immunoglobulins, T cell receptors and Ig-like domains” The Immunologist 7, 132-136), and for each CDR, residues falling under either or both Kabat and IMGT CDR definitions were called as CDR residues. To generate pH-dependent sequence variants, individual amino acid residues within the heavy chain CDRs were systematically substituted with a histidine, one at a time (MYT0519-MYT0557). In cases where the starting CDR residue was a histidine, it was mutated to an alanine. Antibody variants with only one histidine or alanine mutation in a heavy chain CDR were generated by co-transfection of Expi293 cells with a) one heavy chain sequence variant, and b) the corresponding starting ABPC light chain using methods known to the art. After allowing for four days of protein expression, cell culture supernatants were collected, quantified by SDS-PAGE analysis (FIG. 1), and the pH dependence of the variant was evaluated using biolayer interferometry (BLI) on an Octet RED 384 instrument. Briefly, cell culture supernatants were diluted based on qualitative expression level of the variant determined by visual examination of SDS-PAGE gels, 5 μL of cell culture supernatant was diluted into 195 μL of 1× PBST, pH 7.4 for high expressors, 25 μL of cell culture supernatant was diluted into 175 μL of 1× PBST, pH 7.4 for medium expressors and 100 μL of cell culture supernatant was diluted into 100 μL of 1× PBST, pH 7.4 for low expressors for loading onto the sensor tips. Diluted supernatants were then captured on an anti-human Fc sensor (Forte Bio). A baseline was established using 1× PBST (50 mM Potassium Phosphate Buffer+150 mM NaCl+0.05% Tween 20) pH 7.4, and the sensor was associated with 50 nM of CD22 (Acro Biosystems, Cat #CD2-H52H8) in 1× PBST pH 7.4 for 120 sec to generate an association curve. In the dissociation phase, the antibody-antigen complex on the sensor was exposed to 1× PBST pH 7.4 for 300-600 sec. Baseline, association, and dissociation were repeated using 1× PBST pH 5.4 throughout in a separate condition. Association and dissociation phase curves were examined for the starting ABPC antibody (with no substitutions) and each corresponding antibody variant at pH 5.4 and pH 7.4 to inform on two criteria: a) enhanced dissociation (i.e., higher koff values) at pH 5.4 due to histidine or alanine substitution compared to the starting ABPC, (with no substitutions), and b) reduced dissociation at pH 7.4 (i.e., lower koff values) compared to pH 5.4 in the antibody variant itself and with the starting ABPC. (with no substitutions). Heavy chain variants that showed either enhanced dissociation at pH 5.4 or reduced dissociation at pH 7.4 or both (as compared to the starting ABPC), as shown in FIG. 2 were selected for further analysis (e.g, MYT0520, MYT0521, MYT0523, MYT0524, MYT0526, MYT0527, MYT0529-MYT0532, MYT0534-MYT0536, MYT0538, MYT0539, MYT0542, MYT0544, MYT0545, MYT0550, MYT0551, MYT0555, and MYT0557). It was also noted that while some histidine and alanine mutations obliterated CD22 binding (e.g., MYT0525, MYT0528, MYT0546-MYT0549, MYT0552, MYT0553, MYT0554, and MYT0556), others were tolerated with little (e.g., less than 1-fold change in dissociation constant KD or dissociation rate) or no change in CD22 binding kinetics (e.g., MYT0519, MYT0522, MYT0533, MYT0537, MYT0540, MYT0541, and MYT0543). Especially because histidine is a large, positively charged amino acid, these variants with no change were noted as positions in the heavy chain that may tolerate a wide range of mutations and lead to antibodies with different sequence but similar binding properties, a designation that is not otherwise apparent.

### Example 10

### Construction and Screening of pH-Engineered CD22 ABPCs

[0673] Multiple CD22-binding monoclonal antibodies have been described in the literature and can be used as a template for engineering pH-dependent binding (Dijoseph J F et al. (2007) Leukemia, 21(11), 2240-2245). We selected inotuzumab (Heavy chain SEQ ID NO: 1, Light chain SEQ ID NO: 2) as a CD22-binding monoclonal antibody for pH engineering via histidine scanning. Briefly, CDRs in the light chain were identified using the methods described by Kabat et al (Kabat et al. (1992) Sequences of Proteins of Immunological Interest, DIANE publishing) and IMGT (Lefranc M P (1999) “The IMGT unique numbering for Immunoglobulins, T cell receptors and Ig-like domains” The Immunologist 7, 132-136), and for each CDR, residues falling under either or both Kabat and IMGT CDR definitions were called as CDR residues. To generate pH-dependent sequence variants, individual amino acid residues within the light chain CDRs were systematically substituted with a histidine, one at a time (MYT1642-MYT1673). In cases where the starting CDR residue was a histidine, it was mutated to an alanine. Antibody variants with only one histidine or alanine mutation in a light chain CDR were generated by co-transfection of Expi293 cells with a) one light chain sequence variant, and b) the corresponding starting ABPC heavy chain using methods known to the art. After allowing for four days of protein expression, cell culture supernatants were collected, quantified by SDS-PAGE analysis (FIG. 3), and the pH dependence of the variant was evaluated using biolayer interferometry (BLI) on an Octet RED 384 instrument. Briefly, cell culture supernatants were diluted based on qualitative expression level of the variant determined by visual examination of SDS-PAGE gels, 5 μL of cell culture supernatant was diluted into 195 μL of 1× PBST, pH 7.4 for high expressors, 25 μL of cell culture supernatant was diluted into 175 μL of 1× PBST, pH 7.4 for medium expressors and 100 μL of cell culture supernatant was diluted into 100 μL of 1× PBST, pH 7.4 for low expressors for loading onto the sensor tips. Diluted supernatants were then captured on an anti-human Fc sensor (Forte Bio). A baseline was established using 1× PBST (50 mM Potassium Phosphate Buffer+150 mM NaCl+0.05% Tween 20) pH 7.4, and the sensor was associated with 50 nM of CD22 (Acro Biosystems, Cat #CD2-H52H8 Lot No. 2028b-81XF1-KY) in 1× PBST pH 7.4 for 120 sec to generate an association curve. In the dissociation phase, the antibody-antigen complex on the sensor was exposed to 1× PBST pH 7.4 for 300-600 sec. Baseline, association, and dissociation were repeated using 1× PBST pH 5.4 throughout in a separate condition. Association and dissociation phase curves were examined for the starting ABPC antibody (with no substitutions) and each corresponding antibody variant at pH 5.4 and pH 7.4 to inform on two criteria: a) enhanced dissociation (i.e., higher koff values) at pH 5.4 due to histidine or alanine substitution compared to the starting ABPC (with no substitutions), and b) reduced dissociation at pH 7.4 (i.e., lower koff values) compared to pH 5.4 in the antibody variant itself and with the starting ABPC (with no substitutions). Light chain variants that showed either enhanced dissociation at pH 5.4 or reduced dissociation at pH 7.4 or both (as compared to the starting ABPC), as shown in FIG. 4 were selected for further analysis (e.g, MYT1643, MYT1644, MYT1646, MYT1648, MYT1651, MYT1652, MYT1653, MYT1654, MYT1656, MYT1657, MYT1658, MYT1659, MYT1666, and MYT1669). It was also noted that while some histidine and alanine mutations obliterated CD22 binding (e.g., MYT1647, MYT1649, MYT1655, MYT1667, MYT1668, and MYT1671), others were tolerated with little (e.g., less than 1-fold change in dissociation constant KD or dissociation rate) or no change in CD22 binding kinetics (e.g., MYT1642, MYT1645, MYT1650, MYT1660, MYT1661, MYT1662, MYT1663, MYT1664, MYT1665, MYT1670, MYT1672, and MYT1673). Especially because histidine is a large, positively charged amino acid, these variants with no change were noted as positions in the light chain that may tolerate a wide range of mutations and lead to antibodies with different sequence but similar binding properties, a designation that is not otherwise apparent.

### Example 11

### Construction and Screening of pH-Engineered CD22 ABPCs

[0674] Multiple CD22-binding monoclonal antibodies have been described in the literature and can be used as a template for engineering pH-dependent binding [Dijoseph J F et al. (2007) Leukemia, 21(11), 2240-2245]. We selected inotuzumab (Heavy chain SEQ ID NO: 1, Light chain SEQ ID NO: 2) as a CD22-binding monoclonal antibody for pH engineering via histidine scanning. Briefly, CDRs in the heavy chain were identified using the methods described by Kabat et al (Kabat et al. (1992) Sequences of Proteins of Immunological Interest, DIANE publishing) and IMGT (Lefranc M P (1999) “The IMGT unique numbering for Immunoglobulins, T cell receptors and Ig-like domains” The Immunologist 7, 132-136), and for each CDR, residues falling under either or both Kabat and IMGT CDR definitions were called as CDR residues. To generate pH-dependent sequence variants, individual amino acid mutations within the heavy chain CDRs that had been previously selected for further analysis in Example 9 were systematically combined two or more at a time (MYT1621-1640). In cases where the starting CDR residue was a histidine, it was mutated to an alanine. Antibody variants with two or more histidine or alanine mutations in the heavy chain CDRs were generated by co-transfection of Expi293 cells with a) one heavy chain combinations sequence variant, and b) the corresponding starting ABPC light chain using methods known to the art. After allowing for four days of protein expression, cell culture supernatants were collected, quantified by SDS-PAGE analysis (FIG. 5), and the pH dependence of the variant was evaluated using biolayer interferometry (BLI) on an Octet RED 384 instrument. Briefly, cell culture supernatants were diluted based on qualitative expression level of the variant determined by visual examination of SDS-PAGE gels, 5 μL of cell culture supernatant was diluted into 195 μL of 1× PBST, pH 7.4 for high expressors, 25 μL of cell culture supernatant was diluted into 175 μL of 1× PBST, pH 7.4 for medium expressors and 100 μL of cell culture supernatant was diluted into 100 μL of 1× PBST, pH 7.4 for low expressors for loading onto the sensor tips. Diluted supernatants were then captured on an anti-human Fc sensor (Forte Bio). A baseline was established using 1× PBST (50 mM Potassium Phosphate Buffer+150 mM NaCl+0.05% Tween 20) pH 7.4, and the sensor was associated with 50 nM of CD22 (Acro Biosystems, Cat #CD2-H52H8 Lot No. 2028b-81XF1-KY) in 1× PBST pH 7.4 for 120 sec to generate an association curve. In the dissociation phase, the antibody-antigen complex on the sensor was exposed to 1× PBST pH 7.4 for 300-600 sec. Baseline, association, and dissociation were repeated using 1× PBST pH 5.4 throughout in a separate condition. Association and dissociation phase curves were examined for the starting ABPC antibody (with no substitutions) and each corresponding antibody variant at pH 5.4 and pH 7.4 to inform on two criteria: a) enhanced dissociation (i.e., higher koff values) at pH 5.4 due to histidine or alanine substitution compared to the starting ABPC (with no substitutions), and b) reduced dissociation at pH 7.4 (i.e., lower koff values) compared to pH 5.4 in the antibody variant itself and with the starting ABPC (with no substitutions). Heavy chain combinations variants that showed either enhanced dissociation at pH 5.4 or reduced dissociation at pH 7.4 or both (as compared to the starting ABPC), as shown in FIG. 6 were selected for further analysis (e.g, MYT1621, MYT1622, MYT1623, MYT1624, MYT1625, MYT1626, MYT1627, MYT1628, MYT1629, MYT1630, MYT1631, MYT1632, MYT1633, MYT1634, MYT1635, MYT1636, MYT1637, MYT1638, MYT1639, and MYT1640).

[0675] Upon comparison of our results in these Examples 9, 10, and 11 using the Acro Biosystems antigen to equivalent results generated with a CD22 antigen from Sino Biological, we noticed an improved result with the Sino Biological antigen. The Sino Biological antigen had higher affinity for our ABPCs at pH 5.4, increasing its signal to noise in octet experiments, and the pH dependence of variant ABPCs as measured by octet using the Sino Biological antigen was more correlated with increases in endolysosomal delivery across different variant ABPCs. In order to discover additional variant ABPCs with increased pH dependence and endolysosomal delivery, we switched from using the Acro Biosystems antigen to the Sino Biological antigen when measuring inotuzumab and its candidates.

### Example 12

### Construction and Screening of pH-Engineered CD22 ABPCs

[0676] Multiple CD22-binding monoclonal antibodies have been described in the literature and can be used as a template for engineering pH-dependent binding (Dijoseph J F et al. (2007) Leukemia, 21(11), 2240-2245). We selected inotuzumab (Heavy chain SEQ ID NO: 1, Light chain SEQ ID NO: 2) as a CD22-binding monoclonal antibody for pH engineering via histidine scanning. Briefly, CDRs in the heavy chain were identified using the methods described by Kabat et al (Kabat et al. (1992) Sequences of Proteins of Immunological Interest, DIANE publishing) and IMGT (Lefranc M P (1999) “The IMGT unique numbering for Immunoglobulins, T cell receptors and Ig-like domains” The Immunologist 7, 132-136), and for each CDR, residues falling under either or both Kabat and IMGT CDR definitions were called as CDR residues. To generate pH-dependent sequence variants, individual amino acid residues within the heavy chain CDRs were systematically substituted with a histidine, one at a time (MYT0519-MYT0557). In cases where the starting CDR residue was a histidine, it was mutated to an alanine. Antibody variants with only one histidine or alanine mutation in a heavy chain CDR were generated by co-transfection of Expi293 cells with a) one heavy chain sequence variant, and b) the corresponding starting ABPC light chain using methods known to the art. After allowing for four days of protein expression, cell culture supernatants were collected, quantified by SDS-PAGE analysis (FIG. 7), and the pH dependence of the variant was evaluated using biolayer interferometry (BLI) on an Octet RED96e instrument. Briefly, cell culture supernatants were diluted based on qualitative expression level of the variant determined by visual examination of SDS-PAGE gels, 5 μL of cell culture supernatant was diluted into 195 μL of 1× PBST, pH 7.4 for high expressors, 25 μL of cell culture supernatant was diluted into 175 μL of 1× PBST, pH 7.4 for medium expressors and 100 μL of cell culture supernatant was diluted into 100 μL of 1× PBST, pH 7.4 for low expressors for loading onto the sensor tips. Diluted supernatants were then captured on an anti-human Fc sensor (Forte Bio). A baseline was established using 1× PBST (50 mM Potassium Phosphate Buffer+150 mM NaCl+0.05% Tween 20) pH 7.4, and the sensor was associated with 50 nM of CD22 (Sino Biological Cat. No. 11958-H08H) in 1× PBST pH 7.4 for 120 sec to generate an association curve. In the dissociation phase, the antibody-antigen complex on the sensor was exposed to 1× PBST pH 7.4 for 300-600 sec. Baseline and dissociation were repeated using 1× PBST pH 5.4, while maintaining association at pH 7.4, in a separate condition. Association and dissociation phase curves were examined for the starting ABPC antibody (with no substitutions) and each corresponding antibody variant at pH 5.4 and pH 7.4 to inform on two criteria: a) enhanced dissociation (i.e., higher koff values) at pH 5.4 due to histidine or alanine substitution compared to the starting ABPC, (with no substitutions), and b) reduced dissociation at pH 7.4 (i.e., lower koff values) compared to pH 5.4 in the antibody variant itself and with the starting ABPC. (with no substitutions). Heavy chain variants that showed either enhanced dissociation at pH 5.4 or reduced dissociation at pH 7.4 or both (as compared to the starting ABPC), as shown in FIG. 8 were selected for further analysis (e.g, MYT0520, MYT0521, MYT0524, MYT0525, MYT0526, MYT0527, MYT0528, MYT0529, MYT0530, MYT0531 MYT0532, MYT0534, MYT0536, MYT0544, MYT0550, MYT0551, and MYT0557). It was also noted that while some histidine and alanine mutations obliterated CD22 binding (e.g., MYT0545, MYT0546, MYT0547, MYT0548, MYT0549, MYT0552, MYT0553, MYT0554, and MYT0556), others were tolerated with little (e.g., less than 1-fold change in dissociation constant KD or dissociation rate) or no change in CD22 binding kinetics (e.g., MYT0519, MYT0522, MYT0523, MYT0533, MYT0535, MYT0537, MYT0538, MYT0539, MYT0540, MYT0541, MYT0542, MYT0543, and MYT0555). Especially because histidine is a large, positively charged amino acid, these variants with no change were noted as positions in the heavy chain that may tolerate a wide range of mutations and lead to antibodies with different sequence but similar binding properties, a designation that is not otherwise apparent.

### Example 13

### Construction and Screening of pH-Engineered CD22 ABPCs

[0677] Multiple CD22-binding monoclonal antibodies have been described in the literature and can be used as a template for engineering pH-dependent binding (Dijoseph J F et al. (2007) Leukemia, 21(11), 2240-2245). We selected inotuzumab (Heavy chain SEQ ID NO: 1, Light chain SEQ ID NO: 2) as a CD22-binding monoclonal antibody for pH engineering via histidine scanning. Briefly, CDRs in the light chain were identified using the methods described by Kabat et al (Kabat et al. (1992) Sequences of Proteins of Immunological Interest, DIANE publishing) and IMGT (Lefranc M P (1999) “The IMGT unique numbering for Immunoglobulins, T cell receptors and Ig-like domains” The Immunologist 7, 132-136), and for each CDR, residues falling under either or both Kabat and IMGT CDR definitions were called as CDR residues. To generate pH-dependent sequence variants, individual amino acid residues within the light chain CDRs were systematically substituted with a histidine, one at a time (MYT1642-MYT1673). In cases where the starting CDR residue was a histidine, it was mutated to an alanine. Antibody variants with only one histidine or alanine mutation in a light chain CDR were generated by co-transfection of Expi293 cells with a) one light chain sequence variant, and b) the corresponding starting ABPC heavy chain using methods known to the art. After allowing for four days of protein expression, cell culture supernatants were collected, quantified by SDS-PAGE analysis (FIG. 9), and the pH dependence of the variant was evaluated using biolayer interferometry (BLI) on an Octet RED96e instrument. Briefly, cell culture supernatants were diluted based on qualitative expression level of the variant determined by visual examination of SDS-PAGE gels, 5 μL of cell culture supernatant was diluted into 195 μL of 1× PBST, pH 7.4 for high expressors, 25 μL of cell culture supernatant was diluted into 175 μL of 1× PBST, pH 7.4 for medium expressors and 100 μL of cell culture supernatant was diluted into 100 μL of 1× PBST, pH 7.4 for low expressors for loading onto the sensor tips. Diluted supernatants were then captured on an anti-human Fc sensor (Forte Bio). Diluted supernatants were then captured on an anti-human Fc sensor (Forte Bio). A baseline was established using 1× PBST (50 mM Potassium Phosphate Buffer+150 mM NaCl+0.05% Tween 20) pH 7.4, and the sensor was associated with 50 nM of CD22 (Sino Biological Cat. No. 11958-H08H) in 1× PBST pH 7.4 for 120 sec to generate an association curve. In the dissociation phase, the antibody-antigen complex on the sensor was exposed to 1× PBST pH 7.4 for 300-600 sec. Baseline, association, and dissociation were repeated using 1× PBST pH 5.4 throughout in a separate condition. Association and dissociation phase curves were examined for the starting ABPC antibody (with no substitutions) and each corresponding antibody variant at pH 5.4 and pH 7.4 to inform on two criteria: a) enhanced dissociation (i.e., higher koff values) at pH 5.4 due to histidine or alanine substitution compared to the starting ABPC (with no substitutions), and b) reduced dissociation at pH 7.4 (i.e., lower koff values) compared to pH 5.4 in the antibody variant itself and with the starting ABPC (with no substitutions). Light chain variants that showed either enhanced dissociation at pH 5.4 or reduced dissociation at pH 7.4 or both (as compared to the starting ABPC), as shown in FIG. 10 were selected for further analysis (e.g, MYT1643, MYT1644, MYT1646, MYT1647, MYT1648, MYT1651, MYT1652, MYT1653, MYT1654, MYT1655, MYT1656, MYT1657, MYT1659, MYT1666, MYT1668, and MYT1669). It was also noted that while some histidine and alanine mutations obliterated CD22 binding (e.g., MYT1649, MYT1667, and MYT1671), others were tolerated with little (e.g., less than 1-fold change in dissociation constant KD or dissociation rate) or no change in CD22 binding kinetics (e.g., MYT1642, MYT1645, MYT1650, MYT1658, MYT1660, MYT1661, MYT1662, MYT1663, MYT1664, MYT1665, MYT1670, MYT1672, and MYT1673). Especially because histidine is a large, positively charged amino acid, these variants with no change were noted as positions in the light chain that may tolerate a wide range of mutations and lead to antibodies with different sequence but similar binding properties, a designation that is not otherwise apparent.

### Example 14

### Construction and Screening of pH-Engineered CD22 ABPCs

[0678] Multiple CD22-binding monoclonal antibodies have been described in the literature and can be used as a template for engineering pH-dependent binding [Dijoseph J F et al. (2007) Leukemia, 21(11), 2240-2245]. We selected inotuzumab (Heavy chain SEQ ID NO: 1, Light chain SEQ ID NO: 2) as a CD22-binding monoclonal antibody for pH engineering via histidine scanning. Briefly, CDRs in the heavy chain were identified using the methods described by Kabat et al (Kabat et al. (1992) Sequences of Proteins of Immunological Interest, DIANE publishing) and IMGT (Lefranc M P (1999) “The IMGT unique numbering for Immunoglobulins, T cell receptors and Ig-like domains” The Immunologist 7, 132-136), and for each CDR, residues falling under either or both Kabat and IMGT CDR definitions were called as CDR residues. To generate pH-dependent sequence variants, individual amino acid mutations within the heavy chain CDRs that had been previously selected for further analysis in Examples 9 and 12 were systematically combined two or more at a time (MYT1621-MYT1640 and MYT4401-MYT4435). In cases where the starting CDR residue was a histidine, it was mutated to an alanine. Antibody variants with two or more histidine or alanine mutations in the heavy chain CDRs were generated by co-transfection of Expi293 cells with a) one heavy chain combinations sequence variant, and b) the corresponding starting ABPC light chain using methods known to the art. After allowing for four days of protein expression, cell culture supernatants were collected, quantified by SDS-PAGE analysis (FIG. 11), and the pH dependence of the variant was evaluated using biolayer interferometry (BLI) on an Octet RED 384 instrument. Briefly, cell culture supernatants were diluted based on qualitative expression level of the variant determined by visual examination of SDS-PAGE gels, 5 μL of cell culture supernatant was diluted into 195 μL of 1× PBST, pH 7.4 for high expressors, 25 μL of cell culture supernatant was diluted into 175 μL of 1× PBST, pH 7.4 for medium expressors and 100 μL of cell culture supernatant was diluted into 100 μL of 1× PBST, pH 7.4 for low expressors for loading onto the sensor tips. Diluted supernatants were then captured on an anti-human Fc sensor (Forte Bio). A baseline was established using 1× PBST (50 mM Potassium Phosphate Buffer+150 mM NaCl+0.05% Tween 20) pH 7.4, and the sensor was associated with 50 nM of CD22 (Sino Biological Cat. No. 11958-H08H) in 1× PBST pH 7.4 for 120 sec to generate an association curve. In the dissociation phase, the antibody-antigen complex on the sensor was exposed to 1× PBST pH 7.4 for 300-600 sec. For some samples, baseline, association, and dissociation were repeated using 1× PBST pH 5.4 throughout in a separate condition. For other samples baseline and dissociation were repeated using 1× PBST pH 5.4, while maintaining association at pH 7.4 in a separate condition Association and dissociation phase curves were examined for the starting ABPC antibody (with no substitutions) and each corresponding antibody variant at pH 5.4 and pH 7.4 to inform on two criteria: a) enhanced dissociation (i.e., higher koff values) at pH 5.4 due to histidine or alanine substitution compared to the starting ABPC (with no substitutions), and b) reduced dissociation at pH 7.4 (i.e., lower koff values) compared to pH 5.4 in the antibody variant itself and with the starting ABPC (with no substitutions). Heavy chain combinations variants that showed either enhanced dissociation at pH 5.4 or reduced dissociation at pH 7.4 or both (as compared to the starting ABPC), as shown in FIG. 12 were selected for further analysis (e.g, MYT1621, MYT1622, MYT1623, MYT1624, MYT1625, MYT1626, MYT1627, MYT1631, MYT1632, MYT1633, MYT1634, MYT1635, MYT1636, MYT1637, MYT1638, MYT1640,MYT4401, MYT4402, MYT4403, MYT4404, MYT4405, MYT4406, MYT4407, MYT4408, MYT4409, MYT4410, MYT4411, MYT4412, MYT4414, MYT4415, MYT4416, MYT4417, MYT4418, MYT4420, MYT4421, MYT4422, MYT4423, MYT4424, MYT4425, MYT4426, MYT4427, MYT4428, MYT4429, MYT4430, MYT4431, MYT4432, MYT4433, MYT4434, and MYT4435).

### Example 15

### Construction and Screening of pH-Engineered CD22 ABPCs

[0679] Multiple CD22-binding monoclonal antibodies have been described in the literature and can be used as a template for engineering pH-dependent binding [Dijoseph J F et al. (2007) Leukemia, 21(11), 2240-2245]. We selected inotuzumab (Heavy chain SEQ ID NO: 1, Light chain SEQ ID NO: 2) as a CD22-binding monoclonal antibody for pH engineering via histidine scanning. Briefly, CDRs in the light chain were identified using the methods described by Kabat et al (Kabat et al. (1992) Sequences of Proteins of Immunological Interest, DIANE publishing) and IMGT (Lefranc M P (1999) “The IMGT unique numbering for Immunoglobulins, T cell receptors and Ig-like domains” The Immunologist 7, 132-136), and for each CDR, residues falling under either or both Kabat and IMGT CDR definitions were called as CDR residues. To generate pH-dependent sequence variants, individual amino acid mutations within the light chain CDRs that had been previously selected for further analysis in Examples 10 and 13 were systematically combined two or more at a time (MYT4436-MYT4439). In cases where the starting CDR residue was a histidine, it was mutated to an alanine. Antibody variants with two or more histidine or alanine mutations in the light chain CDRs were generated by co-transfection of Expi293 cells with a) one light chain combinations sequence variant, and b) the corresponding starting ABPC heavy chain using methods known to the art. After allowing for four days of protein expression, cell culture supernatants were collected, quantified by SDS-PAGE analysis (FIG. 13), and the pH dependence of the variant was evaluated using biolayer interferometry (BLI) on an Octet RED 96e instrument. Briefly, cell culture supernatants were diluted based on qualitative expression level of the variant determined by visual examination of SDS-PAGE gels, 5 μL of cell culture supernatant was diluted into 195 μL of 1× PBST, pH 7.4 for high expressors, 25 μL of cell culture supernatant was diluted into 175 μL of 1× PBST, pH 7.4 for medium expressors and 100 μL of cell culture supernatant was diluted into 100 μL of 1× PBST, pH 7.4 for low expressors for loading onto the sensor tips. Diluted supernatants were then captured on an anti-human Fc sensor (Forte Bio). A baseline was established using 1× PBST (50 mM Potassium Phosphate Buffer+150 mM NaCl+0.05% Tween 20), pH 7.4, and the sensor was associated with CD22 (Sino Biological Cat. No. 11958-H08H) in 1× PBST, pH 7.4, for 120 sec to generate an association curve. In the dissociation phase, the antibody-antigen complex on the sensor was exposed to 1× PBST, pH 7.4, for 300-600 sec. Baseline, association, and dissociation were repeated using 1× PBST, pH 5.4, throughout in a separate condition. Association and dissociation phase curves were examined for the starting ABPC antibody (with no substitutions) and each corresponding antibody variant at pH 5.4 and pH 7.4 to inform on two criteria: a) enhanced dissociation (e.g., higher koff values) at pH 5.4 due to histidine or alanine substitution compared to the starting ABPC (with no substitutions), and b) reduced dissociation at pH 7.4 (e.g., lower koff values) compared to pH 5.4 in the antibody variant itself and with the starting ABPC (with no substitutions). Light chain combinations variants that showed either enhanced dissociation at pH 5.4 or reduced dissociation at pH 7.4 or both (as compared to the starting ABPC), as shown in FIG. 14 were selected for further analysis (MYT4436, MYT4437, MYT4438, and MYT4439).

### Example 16

### Construction and Screening of pH-Engineered CD22 ABPCs

[0680] Multiple CD22-binding monoclonal antibodies have been described in the literature and can be used as a template for engineering pH-dependent binding [Dijoseph J F et al. (2007) Leukemia, 21(11), 2240-2245]. We selected inotuzumab (Heavy chain SEQ ID NO: 1, Light chain SEQ ID NO: 2) as a CD22-binding monoclonal antibody for pH engineering via histidine scanning. Briefly, CDRs in the heavy and light chains were identified using the methods described by Kabat et al (Kabat et al. (1992) Sequences of Proteins of Immunological Interest, DIANE publishing) and IMGT (Lefranc M P (1999) “The IMGT unique numbering for Immunoglobulins, T cell receptors and Ig-like domains” The Immunologist 7, 132-136), and for each CDR, residues falling under either or both Kabat and IMGT CDR definitions were called as CDR residues. To generate pH-dependent sequence variants, individual amino acid mutations within the heavy and light chain CDRs that had been previously selected for further analysis in Examples 9-15 were systematically combined two or more at a time (MYT4752-MYT4787). In cases where the starting CDR residue was a histidine, it was mutated to an alanine. Antibody variants with two or more histidine or alanine mutations were generated by co-transfection of Expi293 cells with a) one light chain sequence variant or light chain combinations sequence variant, and b) one heavy chain sequence variant or heavy chain combinations sequence variant using methods known to the art. After allowing for four days of protein expression, cell culture supernatants were collected, quantified by SDS-PAGE analysis (FIG. 15), and the pH dependence of the variant was evaluated using biolayer interferometry (BLI) on an Octet RED 96e instrument. Briefly, cell culture supernatants were diluted based on qualitative expression level of the variant determined by visual examination of SDS-PAGE gels, 5 μL of cell culture supernatant was diluted into 195 μL of 1× PBST, pH 7.4 for high expressors, 25 μL of cell culture supernatant was diluted into 175 μL of 1× PBST, pH 7.4 for medium expressors and 100 μL of cell culture supernatant was diluted into 100 μL of 1× PBST, pH 7.4 for low expressors for loading onto the sensor tips. Diluted supernatants were then captured on an anti-human Fc sensor (Forte Bio). A baseline was established using 1× PBST (50 mM Potassium Phosphate Buffer+150 mM NaCl+0.05% Tween 20), pH 7.4, and the sensor was associated with 50 nM of CD22 (Sino Biological Cat. No. 11958-H08H) in 1× PBST, pH 7.4, for 120 sec to generate an association curve. In the dissociation phase, the antibody-antigen complex on the sensor was exposed to 1× PBST, pH 7.4, for 300-600 sec. Baseline, association, and dissociation were repeated using 1× PBST, pH 5.4, throughout in a separate condition. Association and dissociation phase curves were examined for the starting ABPC antibody (with no substitutions) and each corresponding antibody variant at pH 5.4 and pH 7.4 to inform on two criteria: a) enhanced dissociation (e.g., higher koff values) at pH 5.4 due to histidine or alanine substitution compared to the starting ABPC (with no substitutions), and b) reduced dissociation at pH 7.4 (e.g., lower koff values) compared to pH 5.4 in the antibody variant itself and with the starting ABPC (with no substitutions). Paired heavy and light chain variants that showed either enhanced dissociation at pH 5.4 or reduced dissociation at pH 7.4 or both (as compared to the starting ABPC), as shown in FIG. 16, were selected for further analysis (MYT4752, MYT4754, MYT4756, MYT4757, MYT4758, MYT4761, MYT4763, MYT4765, MYT4766, MYT4767, MYT4768, MYT4770, and MYT4774).

### Example 17

### Construction and Screening of pH-Engineered CD22 ABPCs

[0681] Multiple CD22-binding monoclonal antibodies have been described in the literature and can be used as a template for engineering pH-dependent binding (Li, et. al., DCDT2980S, an anti-CD22-monomethyl auristatin E antibody-drug conjugate, is a potential treatment for non-Hodgkin lymphoma.” Mol Cancer Ther. 12(7):1255-1265 (2013)). We selected pinatuzumab (Heavy chain SEQ ID NO: 143, Light chain SEQ ID NO: 144) as a CD22-binding monoclonal antibody for pH engineering via histidine scanning. Briefly, CDRs in the heavy chain were identified using the methods described by Kabat et al (Kabat et al. (1992) Sequences of Proteins of Immunological Interest, DIANE publishing) and IMGT (Lefranc M P (1999) “The IMGT unique numbering for Immunoglobulins, T cell receptors and Ig-like domains” The Immunologist 7, 132-136), and for each CDR, residues falling under either or both Kabat and IMGT CDR definitions were called as CDR residues. To generate pH-dependent sequence variants, individual amino acid residues within the heavy chain CDRs were systematically substituted with a histidine, one at a time (MYT1294-MYT1333). In cases where the starting CDR residue was a histidine, it was mutated to an alanine. Antibody variants with only one histidine or alanine mutation in a heavy chain CDR were generated by co-transfection of Expi293 cells with a) one heavy chain sequence variant, and b) the corresponding starting ABPC light chain using methods known to the art. After allowing for four days of protein expression, cell culture supernatants were collected, quantified by SDS-PAGE analysis (FIG. 17), and the pH dependence of the variant was evaluated using biolayer interferometry (BLI) on an Octet RED 384 instrument. Briefly, 5 μL of cell culture supernatant was diluted into 195 μL of 1× PBST pH 7.4 for loading onto the AHC sensor tips. This resulted in a high concentration of 13.0 μg/mL, a low concentration of 3.7 μg/mL and an average concentration of 7.9 μg/mL. The resulting diluted supernatant was then captured on an anti-human Fc sensor (Forte Bio). A baseline was established using 1× PBST (50 mM Potassium Phosphate Buffer+150 mM NaCl+0.05% Tween 20) pH 7.4, and the sensor was associated with 50 nM of CD22 (CD22 Protein (His Tag), Sino Biological Cat. No. 11958-H08H, Lot No. LC11JL0406) in 1× PBST pH 7.4 for 120 sec to generate an association curve. In the dissociation phase, the antibody-antigen complex on the sensor was exposed to 1× PBST pH 7.4 for 180 sec. Baseline, association, and dissociation were repeated using 1× PBST (50 mM Potassium Phosphate Buffer+150 mM NaCl+0.05% Tween 20) pH 5.4 throughout in a separate condition. Association and dissociation phase curves were examined for the starting ABPC (with no substitutions) antibody and each corresponding antibody variant at pH 5.4 and pH 7.4 to inform on two criteria: a) enhanced dissociation (i.e., higher koff values) at pH 5.4 due to histidine or alanine substitution compared to the starting ABPC (with no substitutions), and b) reduced dissociation at pH 7.4 (i.e., lower koff values) compared to pH 5.4 in the antibody variant itself and with the starting ABPC (with no substitutions). Heavy chain variants that showed either enhanced dissociation at pH 5.4 or reduced dissociation at pH 7.4 or both (as compared to the starting ABPC), as shown in FIG. 18 were selected for further analysis (e.g, MYT1295, MYT1296, MYT1297, MYT1298, MYT1299, MYT1302, MYT1303, MYT1304, MYT1305, MYT1308, MYT1311, MYT1313, MYT1318, MYT1322, MYT1325, MYT1326, MYT1330, and MYT1331). It was also noted that while some histidine and alanine mutations obliterated CD22 binding (e.g., MYT1301, MYT1306, MYT1307, MYT1309, MYT1321, MYT1323, MYT1324, MYT1327, MYT1328, and MYT1329), others were tolerated with little (e.g., less than 1-fold change in dissociation constant KD or dissociation rate) or no change in CD22 binding kinetics (e.g., MYT1294, MYT1310, MYT1312, MYT1314, MYT1315, MYT1316, MYT1317, MYT1319, MYT1320, MYT1332, and MYT1333). Especially because histidine is a large, positively charged amino acid, these variants with no change were noted as positions in the heavy chain that may tolerate a wide range of mutations and lead to antibodies with different sequence but similar binding properties, a designation that is not otherwise apparent.

[0682] After careful review and re-analysis of the experiments performed and data generated in this Example 17, the antigen used in this Example 17 was not Sino Biological Cat. No. 11958-H08H, but rather Acro Biosystems, Cat #CD2-H52H8. The low affinity seen in the octet plots in FIG. 18, even with the pinatuzumab starting ABPC (MYT1293) was consistent with the use of the Acro Biosystems antigen and not the Sino Biological antigen (compare, e.g., FIG. 20a, MYT1293 with Sino Biological, with FIG. 18a, MYT1293 with Acro Biosystems).

[0683] For similar reasons as described in Example 11 (e.g., with the Acro Biosystems antigen: low affinity binding on octet at pH 7.4 and pH 5.4 reducing our signal to noise, and reduced correlation between pH dependence observed on octet and increases in endolysosomal delivery), and in order to discover additional variant ABPCs with increased pH dependence and endolysosomal delivery, we switched from using the Acro Biosystems antigen to the Sino Biological antigen when measuring pinatuzumab and its candidates.

### Example 18

### Construction and Screening of pH-Engineered CD22 ABPCs

[0684] Multiple CD22-binding monoclonal antibodies have been described in the literature and can be used as a template for engineering pH-dependent binding (Li, et. al., DCDT2980S, an anti-CD22-monomethyl auristatin E antibody-drug conjugate, is a potential treatment for non-Hodgkin lymphoma.” Mol Cancer Ther. 12(7):1255-1265 (2013)). We selected pinatuzumab (Heavy chain SEQ ID NO: 143, Light chain SEQ ID NO: 144) as a CD22-binding monoclonal antibody for pH engineering via histidine scanning. Briefly, CDRs in the heavy chain were identified using the methods described by Kabat et al (Kabat et al. (1992) Sequences of Proteins of Immunological Interest, DIANE publishing) and IMGT (Lefranc M P (1999) “The IMGT unique numbering for Immunoglobulins, T cell receptors and Ig-like domains” The Immunologist 7, 132-136), and for each CDR, residues falling under either or both Kabat and IMGT CDR definitions were called as CDR residues. To generate pH-dependent sequence variants, individual amino acid residues within the heavy chain CDRs were systematically substituted with a histidine, one at a time (MYT1294-MYT1333). In cases where the starting CDR residue was a histidine, it was mutated to an alanine. Antibody variants with only one histidine or alanine mutation in a heavy chain CDR were generated by co-transfection of Expi293 cells with a) one heavy chain sequence variant, and b) the corresponding starting ABPC light chain using methods known to the art. After allowing for four days of protein expression, cell culture supernatants were collected, quantified by SDS-PAGE analysis (FIG. 19), and the pH dependence of the variant was evaluated using biolayer interferometry (BLI) on an Octet RED 96e instrument. Briefly, cell culture supernatants were diluted based on qualitative expression level of the variant determined by visual examination of SDS-PAGE gels, 5 μL of cell culture supernatant was diluted into 195 μL of 1× PBST, pH 7.4 for high expressors, 25 μL of cell culture supernatant was diluted into 175 μL of 1× PBST, pH 7.4 for medium expressors and 100 μL of cell culture supernatant was diluted into 100 μL of 1× PBST, pH 7.4 for low expressors for loading onto the sensor tips. Diluted supernatants were then captured on an anti-human Fc sensor (Forte Bio). A baseline was established using 1× PBST (50 mM Potassium Phosphate Buffer+150 mM NaCl+0.05% Tween 20) pH 7.4, and the sensor was associated with 50 nM of CD22 (CD22 Protein (His Tag), Sino Biological Cat. No. 11958-H08H) in 1× PBST pH 7.4 for 120 sec to generate an association curve. In the dissociation phase, the antibody-antigen complex on the sensor was exposed to 1× PBST pH 7.4 for 180 sec. Baseline, association, and dissociation were repeated using 1× PBST (50 mM Potassium Phosphate Buffer+150 mM NaCl+0.05% Tween 20) pH 5.4 throughout in a separate condition. Association and dissociation phase curves were examined for the starting ABPC (with no substitutions) antibody and each corresponding antibody variant at pH 5.4 and pH 7.4 to inform on two criteria: a) enhanced dissociation (i.e., higher koff values) at pH 5.4 due to histidine or alanine substitution compared to the starting ABPC (with no substitutions), and b) reduced dissociation at pH 7.4 (i.e., lower koff values) compared to pH 5.4 in the antibody variant itself and with the starting ABPC (with no substitutions). Heavy chain variants that showed either enhanced dissociation at pH 5.4 or reduced dissociation at pH 7.4 or both (as compared to the starting ABPC), as shown in FIG. 20 were selected for further analysis (e.g, MYT1295, MYT1296, MYT1299, MYT1302, MYT1303, MYT1304, MYT1307, MYT1309, MYT1311, MYT1313, MYT1322, MYT1325, MYT1326, MYT1328, MYT1330, MYT1331, and MYT1332). It was also noted that while some histidine and alanine mutations obliterated CD22 binding (e.g., MYT1301, MYT1306, MYT1321, MYT1323, MYT1324, MYT1327, and MYT1329), others were tolerated with little (e.g., less than 1-fold change in dissociation constant KD or dissociation rate) or no change in CD22 binding kinetics (e.g., MYT1294, MYT1297, MYT1298, MYT1300, MYT1305, MYT1308, MYT1310, MYT1312, MYT1314, MYT1315, MYT1316, MYT1317, MYT1318, MYT1319, MYT1320, and MYT1333). Especially because histidine is a large, positively charged amino acid, these variants with no change were noted as positions in the heavy chain that may tolerate a wide range of mutations and lead to antibodies with different sequence but similar binding properties, a designation that is not otherwise apparent.

### Example 19

### Construction and Screening of pH-Engineered CD22 ABPCs

[0685] Multiple CD22-binding monoclonal antibodies have been described in the literature and can be used as a template for engineering pH-dependent binding (Li, et. al., DCDT2980S, an anti-CD22-monomethyl auristatin E antibody-drug conjugate, is a potential treatment for non-Hodgkin lymphoma.” Mol Cancer Ther. 12(7):1255-1265 (2013)). We selected pinatuzumab (Heavy chain SEQ ID NO: 143, Light chain SEQ ID NO: 144) as a CD22-binding monoclonal antibody for pH engineering via histidine scanning. Briefly, CDRs in the light chain were identified using the methods described by Kabat et al (Kabat et al. (1992) Sequences of Proteins of Immunological Interest, DIANE publishing) and IMGT (Lefranc M P (1999) “The IMGT unique numbering for Immunoglobulins, T cell receptors and Ig-like domains” The Immunologist 7, 132-136), and for each CDR, residues falling under either or both Kabat and IMGT CDR definitions were called as CDR residues. To generate pH-dependent sequence variants, individual amino acid residues within the light chain CDRs were systematically substituted with a histidine, one at a time (MYT2690-MYT2721). In cases where the starting CDR residue was a histidine, it was mutated to an alanine. Antibody variants with only one histidine or alanine mutation in a light chain CDR were generated by co-transfection of Expi293 cells with a) one light chain sequence variant, and b) the corresponding starting ABPC heavy chain using methods known to the art. After allowing for four days of protein expression, cell culture supernatants were collected, quantified by SDS-PAGE analysis (FIG. 21), and the pH dependence of the variant was evaluated using biolayer interferometry (BLI) on an Octet RED96e instrument. Briefly, cell culture supernatants were diluted based on qualitative expression level of the variant determined by visual examination of SDS-PAGE gels, 5 μL of cell culture supernatant was diluted into 195 μL of 1× PBST, pH 7.4 for high expressors, 25 μL of cell culture supernatant was diluted into 175 μL of 1× PBST, pH 7.4 for medium expressors and 100 μL of cell culture supernatant was diluted into 100 μL of 1× PBST, pH 7.4 for low expressors for loading onto the sensor tips. Diluted supernatants were then captured on an anti-human Fc sensor (Forte Bio). Briefly, 25 μL of cell culture supernatant was diluted into 175 μL of 1× PBST pH 7.4 for loading onto the sensor tips. Diluted supernatants were then captured on an anti-human Fc sensor (Forte Bio). A baseline was established using 1× PBST (50 mM Potassium Phosphate Buffer+150 mM NaCl+0.05% Tween 20) pH 7.4, and the sensor was associated with 50 nM of CD22 (Sino Biological Cat. No. 11958-H08H) in 1× PBST pH 7.4 for 120 sec to generate an association curve. In the dissociation phase, the antibody-antigen complex on the sensor was exposed to 1× PBST pH 7.4 for 300-600 sec. Baseline, association, and dissociation were repeated using 1× PBST pH 5.4 throughout in a separate condition. Association and dissociation phase curves were examined for the starting ABPC antibody (with no substitutions) and each corresponding antibody variant at pH 5.4 and pH 7.4 to inform on two criteria: a) enhanced dissociation (i.e., higher koff values) at pH 5.4 due to histidine or alanine substitution compared to the starting ABPC (with no substitutions), and b) reduced dissociation at pH 7.4 (i.e., lower koff values) compared to pH 5.4 in the antibody variant itself and with the starting ABPC (with no substitutions). Light chain variants that showed either enhanced dissociation at pH 5.4 or reduced dissociation at pH 7.4 or both (as compared to the starting ABPC), as shown in FIG. 22 were selected for further analysis (e.g, MYT2691, MYT2695, MYT2696, MYT2702, MYT2703, MYT2704, MYT2705, MYT2706, MYT2713, MYT2714, MYT2716, MYT2718, MYT2719, MYT2720, and MYT2721). It was also noted that some histidine and alanine mutations were tolerated with little (e.g., less than 1-fold change in dissociation constant KD or dissociation rate) or no change in CD22 binding kinetics (e.g., MYT2690, MYT2692, MYT2693, MYT2694, MYT2697, MYT2698, MYT2699, MYT2700, MYT2701, MYT2707, MYT2708, MYT2709, MYT2710, MYT2711, MYT2712, and MYT2717). Especially because histidine is a large, positively charged amino acid, these variants with no change were noted as positions in the light chain that may tolerate a wide range of mutations and lead to antibodies with different sequence but similar binding properties, a designation that is not otherwise apparent.

### Example 20

### Construction and Screening of pH-Engineered CD22 ABPCs

[0686] Multiple CD22-binding monoclonal antibodies have been described in the literature and can be used as a template for engineering pH-dependent binding (Li, et. al., DCDT2980S, an anti-CD22-monomethyl auristatin E antibody-drug conjugate, is a potential treatment for non-Hodgkin lymphoma.” Mol Cancer Ther. 12(7):1255-1265 (2013)). We selected pinatuzumab (Heavy chain SEQ ID NO: 143, Light chain SEQ ID NO: 144) as a CD22-binding monoclonal antibody for pH engineering via histidine scanning. Briefly, CDRs in the heavy chain were identified using the methods described by Kabat et al (Kabat et al. (1992) Sequences of Proteins of Immunological Interest, DIANE publishing) and IMGT (Lefranc M P (1999) “The IMGT unique numbering for Immunoglobulins, T cell receptors and Ig-like domains” The Immunologist 7, 132-136), and for each CDR, residues falling under either or both Kabat and IMGT CDR definitions were called as CDR residues. To generate pH-dependent sequence variants, individual amino acid mutations within the heavy chain CDRs that had been previously selected for further analysis in Examples 17 and 18 were systematically combined two or more at a time (MYT2680-MYT2689, and MYT4440-4474). In cases where the starting CDR residue was a histidine, it was mutated to an alanine. Antibody variants with two or more histidine or alanine mutations in the heavy chain CDRs were generated by co-transfection of Expi293 cells with a) one heavy chain combinations sequence variant, and b) the corresponding starting ABPC light chain using methods known to the art. After allowing for four days of protein expression, cell culture supernatants were collected, quantified by SDS-PAGE analysis (FIG. 23), and the pH dependence of the variant was evaluated using biolayer interferometry (BLI) on an Octet RED 384 instrument. Briefly, cell culture supernatants were diluted based on qualitative expression level of the variant determined by visual examination of SDS-PAGE gels, 5 μL of cell culture supernatant was diluted into 195 μL of 1× PBST, pH 7.4 for high expressors, 25 μL of cell culture supernatant was diluted into 175 μL of 1× PBST, pH 7.4 for medium expressors and 100 μL of cell culture supernatant was diluted into 100 μL of 1× PBST, pH 7.4 for low expressors for loading onto the sensor tips. Diluted supernatants were then captured on an anti-human Fc sensor (Forte Bio). Briefly, 25 μL of cell culture supernatant was diluted into 175 μL of 1× PBST pH 7.4 for loading onto the sensor tips. Diluted supernatants were then captured on an anti-human Fc sensor (Forte Bio). A baseline was established using 1× PBST (50 mM Potassium Phosphate Buffer+150 mM NaCl+0.05% Tween 20) pH 7.4, and the sensor was associated with 50 nM of CD22 (Sino Biological Cat. No. 11958-H08H) in 1× PBST pH 7.4 for 120 sec to generate an association curve. In the dissociation phase, the antibody-antigen complex on the sensor was exposed to 1× PBST pH 7.4 for 300-600 sec. Baseline, association, and dissociation were repeated using 1× PBST pH 5.4 throughout in a separate condition. Association and dissociation phase curves were examined for the starting ABPC antibody (with no substitutions) and each corresponding antibody variant at pH 5.4 and pH 7.4 to inform on two criteria: a) enhanced dissociation (i.e., higher koff values) at pH 5.4 due to histidine or alanine substitution compared to the starting ABPC (with no substitutions), and b) reduced dissociation at pH 7.4 (i.e., lower koff values) compared to pH 5.4 in the antibody variant itself and with the starting ABPC (with no substitutions). Heavy chain combinations variants that showed either enhanced dissociation at pH 5.4 or reduced dissociation at pH 7.4 or both (as compared to the starting ABPC), as shown in FIG. 24 were selected for further analysis (e.g, MYT2680, MYT2681, MYT2682, MYT2683, MYT2684, MYT2685, MYT2686, MYT2687, MYT2688, MYT4440, MYT4445, MYT4446, MYT4447, and MYT4448).

### Example 21

### Construction and Screening of pH-Engineered CD22 ABPCs

[0687] Multiple CD22-binding monoclonal antibodies have been described in the literature and can be used as a template for engineering pH-dependent binding (Li, et. al., DCDT2980S, an anti-CD22-monomethyl auristatin E antibody-drug conjugate, is a potential treatment for non-Hodgkin lymphoma.” Mol Cancer Ther. 12(7):1255-1265 (2013)). We selected pinatuzumab (Heavy chain SEQ ID NO: 143, Light chain SEQ ID NO: 144) as a CD22-binding monoclonal antibody for pH engineering via histidine scanning. Briefly, CDRs in the heavy and light chains were identified using the methods described by Kabat et al (Kabat et al. (1992) Sequences of Proteins of Immunological Interest, DIANE publishing) and IMGT (Lefranc M P (1999) “The IMGT unique numbering for Immunoglobulins, T cell receptors and Ig-like domains” The Immunologist 7, 132-136), and for each CDR, residues falling under either or both Kabat and IMGT CDR definitions were called as CDR residues. To generate pH-dependent sequence variants, individual amino acid mutations within the heavy and light chain CDRs that had been previously selected for further analysis in Examples 17-20 were systematically combined two or more at a time (MYT4788-MYT4805). In cases where the starting CDR residue was a histidine, it was mutated to an alanine. Antibody variants with two or more histidine or alanine mutations were generated by co-transfection of Expi293 cells with a) one light chain sequence variant or light chain combinations sequence variant, and b) one heavy chain sequence variant or heavy chain combinations sequence variant using methods known to the art. After allowing for four days of protein expression, cell culture supernatants were collected, quantified by SDS-PAGE analysis (FIG. 25), and the pH dependence of the variant was evaluated using biolayer interferometry (BLI) on an Octet RED 96e instrument. Briefly, cell culture supernatants were diluted based on qualitative expression level of the variant determined by visual examination of SDS-PAGE gels, 5 μL of cell culture supernatant was diluted into 195 μL of 1× PBST, pH 7.4 for high expressors, 25 μL of cell culture supernatant was diluted into 175 μL of 1× PBST, pH 7.4 for medium expressors and 100 μL of cell culture supernatant was diluted into 100 μL of 1× PBST, pH 7.4 for low expressors for loading onto the sensor tips. Diluted supernatants were then captured on an anti-human Fc sensor (Forte Bio). A baseline was established using 1× PBST (50 mM Potassium Phosphate Buffer+150 mM NaCl+0.05% Tween 20), pH 7.4, and the sensor was associated with 50 nM of CD22 (Sino Biological Cat. No. 11958-H08H) in 1× PBST, pH 7.4, for 120 sec to generate an association curve. In the dissociation phase, the antibody-antigen complex on the sensor was exposed to 1× PBST, pH 7.4, for 300-600 sec. Baseline, association, and dissociation were repeated using 1× PBST, pH 5.4, throughout in a separate condition. Association and dissociation phase curves were examined for the starting ABPC antibody (with no substitutions) and each corresponding antibody variant at pH 5.4 and pH 7.4 to inform on two criteria: a) enhanced dissociation (e.g., higher koff values) at pH 5.4 due to histidine or alanine substitution compared to the starting ABPC (with no substitutions), and b) reduced dissociation at pH 7.4 (e.g., lower koff values) compared to pH 5.4 in the antibody variant itself and with the starting ABPC (with no substitutions). Paired heavy and light chain variants that showed either enhanced dissociation at pH 5.4 or reduced dissociation at pH 7.4 or both (as compared to the starting ABPC), as shown in FIG. 26, were selected for further analysis (MYT4797, MYT4801, and MYT4802).

### Example 22

### Construction and Screening of pH-Engineered CD22 ABPCs

[0688] Multiple CD22-binding monoclonal antibodies have been described in the literature and can be used as a template for engineering pH-dependent binding (Drake, P M et. al. “CAT-02-106, a Site-Specifically Conjugated Anti-CD22 Antibody Bearing an MDR1-Resistant Maytansine Payload Yields Excellent Efficacy and Safety in Preclinical Models” Mol Cancer Ther. 17(1):161-168 (2018)). We selected TRPH-222 (Heavy chain SEQ ID NO: 268, Light chain SEQ ID NO: 269) as a CD22-binding monoclonal antibody for pH engineering via histidine scanning. Briefly, CDRs in the heavy chain were identified using the methods described by Kabat et al (Kabat et al. (1992) Sequences of Proteins of Immunological Interest, DIANE publishing) and IMGT (Lefranc M P (1999) “The IMGT unique numbering for Immunoglobulins, T cell receptors and Ig-like domains” The Immunologist 7, 132-136), and for each CDR, residues falling under either or both Kabat and IMGT CDR definitions were called as CDR residues. To generate pH-dependent sequence variants, individual amino acid residues within the heavy chain CDRs were systematically substituted with a histidine, one at a time (MYT2270-MYT2312). In cases where the starting CDR residue was a histidine, it was mutated to an alanine. Antibody variants with only one histidine or alanine mutation in a heavy chain CDR were generated by co-transfection of Expi293 cells with a) one heavy chain sequence variant, and b) the corresponding starting ABPC light chain using methods known to the art. After allowing for four days of protein expression, cell culture supernatants were collected, quantified by SDS-PAGE analysis (FIG. 27), and the pH dependence of the variant was evaluated using biolayer interferometry (BLI) on an Octet RED 96e instrument. Briefly, cell culture supernatants were diluted based on qualitative expression level of the variant determined by visual examination of SDS-PAGE gels, 5 μL of cell culture supernatant was diluted into 195 μL of 1× PBST, pH 7.4 for high expressors, 25 μL of cell culture supernatant was diluted into 175 μL of 1× PBST, pH 7.4 for medium expressors and 100 μL of cell culture supernatant was diluted into 100 μL of 1× PBST, pH 7.4 for low expressors for loading onto the sensor tips. Diluted supernatants were then captured on an anti-human Fc sensor (Forte Bio). A baseline was established using 1× PBST (50 mM Potassium Phosphate Buffer+150 mM NaCl+0.05% Tween 20) pH 7.4, and the sensor was associated with 50 nM of CD22 (CD22 Protein (His Tag), Sino Biological Cat. No. 11958-H08H) in 1× PBST pH 7.4 for 120 sec to generate an association curve. In the dissociation phase, the antibody-antigen complex on the sensor was exposed to 1× PBST pH 7.4 for 180 sec. Baseline, association, and dissociation were repeated using 1× PBST (50 mM Potassium Phosphate Buffer+150 mM NaCl+0.05% Tween 20) pH 5.4 throughout in a separate condition. Association and dissociation phase curves were examined for the starting ABPC (with no substitutions) antibody and each corresponding antibody variant at pH 5.4 and pH 7.4 to inform on two criteria: a) enhanced dissociation (i.e., higher koff values) at pH 5.4 due to histidine or alanine substitution compared to the starting ABPC (with no substitutions), and b) reduced dissociation at pH 7.4 (i.e., lower koff values) compared to pH 5.4 in the antibody variant itself and with the starting ABPC (with no substitutions). Heavy chain variants that showed either enhanced dissociation at pH 5.4 or reduced dissociation at pH 7.4 or both (as compared to the starting ABPC), as shown in FIG. 28 were selected for further analysis (e.g, MYT2276, MYT2277, MYT2284, MYT2285, MYT2297, MYT2298, MYT2299, MYT2300, MYT2302, MYT2306, MYT2307, and MYT2311). It was also noted that while some histidine and alanine mutations obliterated CD22 binding (e.g., MYT2275, MYT2301, and MYT2303), others were tolerated with little (e.g., less than 1-fold change in dissociation constant KD or dissociation rate) or no change in CD22 binding kinetics (e.g., MYT2270, MYT2271, MYT2272, MYT2273, MYT2274, MYT2278, MYT2279, MYT2280, MYT2281, MYT2282, MYT2283, MYT2286, MYT2287, MYT2288, MYT2289, MYT2290, MYT2291, MYT2292, MYT2293, MYT2294, MYT2295, MYT2296, MYT2304, MYT2305, MYT2308, MYT2309, MYT2310, and MYT2312). Especially because histidine is a large, positively charged amino acid, these variants with no change were noted as positions in the heavy chain that may tolerate a wide range of mutations and lead to antibodies with different sequence but similar binding properties, a designation that is not otherwise apparent.

### Example 23

### Construction and Screening of pH-Engineered CD22 ABPCs

[0689] Multiple CD22-binding monoclonal antibodies have been described in the literature and can be used as a template for engineering pH-dependent binding (Drake, P M et. al. “CAT-02-106, a Site-Specifically Conjugated Anti-CD22 Antibody Bearing an MDR1-Resistant Maytansine Payload Yields Excellent Efficacy and Safety in Preclinical Models” Mol Cancer Ther. 17(1):161-168 (2018)). We selected TRPH-222 (Heavy chain SEQ ID NO: 268, Light chain SEQ ID NO: 269) as a CD22-binding monoclonal antibody for pH engineering via histidine scanning. Briefly, CDRs in the light chain were identified using the methods described by Kabat et al (Kabat et al. (1992) Sequences of Proteins of Immunological Interest, DIANE publishing) and IMGT (Lefranc M P (1999) “The IMGT unique numbering for Immunoglobulins, T cell receptors and Ig-like domains” The Immunologist 7, 132-136), and for each CDR, residues falling under either or both Kabat and IMGT CDR definitions were called as CDR residues. To generate pH-dependent sequence variants, individual amino acid residues within the light chain CDRs were systematically substituted with a histidine, one at a time (MYT4043-MYT4069). In cases where the starting CDR residue was a histidine, it was mutated to an alanine. Antibody variants with only one histidine or alanine mutation in a light chain CDR were generated by co-transfection of Expi293 cells with a) one light chain sequence variant, and b) the corresponding starting ABPC heavy chain using methods known to the art. After allowing for four days of protein expression, cell culture supernatants were collected, quantified by SDS-PAGE analysis (FIG. 29), and the pH dependence of the variant was evaluated using biolayer interferometry (BLI) on an Octet RED96e instrument. Briefly, cell culture supernatants were diluted based on qualitative expression level of the variant determined by visual examination of SDS-PAGE gels, 5 μL of cell culture supernatant was diluted into 195 μL of 1× PBST, pH 7.4 for high expressors, 25 μL of cell culture supernatant was diluted into 175 μL of 1× PBST, pH 7.4 for medium expressors and 100 μL of cell culture supernatant was diluted into 100 μL of 1× PBST, pH 7.4 for low expressors for loading onto the sensor tips. Diluted supernatants were then captured on an anti-human Fc sensor (Forte Bio). A baseline was established using 1× PBST (50 mM Potassium Phosphate Buffer+150 mM NaCl+0.05% Tween 20) pH 7.4, and the sensor was associated with 50 nM of CD22 (Sino Biological Cat. No. 11958-H08H) in 1× PBST pH 7.4 for 120 sec to generate an association curve. In the dissociation phase, the antibody-antigen complex on the sensor was exposed to 1× PBST pH 7.4 for 300-600 sec. Baseline, association, and dissociation were repeated using 1× PBST pH 5.4 throughout in a separate condition. Association and dissociation phase curves were examined for the starting ABPC antibody (with no substitutions) and each corresponding antibody variant at pH 5.4 and pH 7.4 to inform on two criteria: a) enhanced dissociation (i.e., higher koff values) at pH 5.4 due to histidine or alanine substitution compared to the starting ABPC (with no substitutions), and b) reduced dissociation at pH 7.4 (i.e., lower koff values) compared to pH 5.4 in the antibody variant itself and with the starting ABPC (with no substitutions). Light chain variants that showed either enhanced dissociation at pH 5.4 or reduced dissociation at pH 7.4 or both (as compared to the starting ABPC), as shown in FIG. 30 were selected for further analysis (e.g, MYT4057, MYT4059, and MYT4063). It was also noted that some histidine and alanine mutations were tolerated with little (e.g., less than 1-fold change in dissociation constant KD or dissociation rate) or no change in CD22 binding kinetics (e.g. MYT4043, MYT4044, MYT4045, MYT4046, MYT4047, MYT4048, MYT4049, MYT4050, MYT4051, MYT4052, MYT4053, MYT4054, MYT4055, MYT4056, MYT4058, MYT4060, MYT4061, MYT4062, MYT4064, MYT4065, MYT4066, MYT4067, MYT4068, and MYT4069). Especially because histidine is a large, positively charged amino acid, these variants with no change were noted as positions in the light chain that may tolerate a wide range of mutations and lead to antibodies with different sequence but similar binding properties, a designation that is not otherwise apparent.

### Example 24

### Construction and Screening of pH-Engineered CD22 ABPCs

[0690] Multiple CD22-binding monoclonal antibodies have been described in the literature and can be used as a template for engineering pH-dependent binding (Drake, P M et. al. “CAT-02-106, a Site-Specifically Conjugated Anti-CD22 Antibody Bearing an MDR1-Resistant Maytansine Payload Yields Excellent Efficacy and Safety in Preclinical Models” Mol Cancer Ther. 17(1):161-168 (2018)). We selected TRPH-222 (Heavy chain SEQ ID NO: 268, Light chain SEQ ID NO: 269) as a CD22-binding monoclonal antibody for pH engineering via histidine scanning. Briefly, CDRs in the heavy chain were identified using the methods described by Kabat et al (Kabat et al. (1992) Sequences of Proteins of Immunological Interest, DIANE publishing) and IMGT (Lefranc M P (1999) “The IMGT unique numbering for Immunoglobulins, T cell receptors and Ig-like domains” The Immunologist 7, 132-136), and for each CDR, residues falling under either or both Kabat and IMGT CDR definitions were called as CDR residues. To generate pH-dependent sequence variants, individual amino acid mutations within the heavy chain CDRs that had been previously selected for further analysis in Example 22 and 189 were systematically combined two or more at a time (MYT4070-MYT4089). In cases where the starting CDR residue was a histidine, it was mutated to an alanine. Antibody variants with two or more histidine or alanine mutations in the heavy chain CDRs were generated by co-transfection of Expi293 cells with a) one heavy chain combinations sequence variant, and b) the corresponding starting ABPC light chain using methods known to the art. After allowing for four days of protein expression, cell culture supernatants were collected, quantified by SDS-PAGE analysis (FIG. 31), and the pH dependence of the variant was evaluated using biolayer interferometry (BLI) on an Octet RED 96e instrument. Briefly, cell culture supernatants were diluted based on qualitative expression level of the variant determined by visual examination of SDS-PAGE gels, 5 μL of cell culture supernatant was diluted into 195 μL of 1× PBST, pH 7.4 for high expressors, 25 μL of cell culture supernatant was diluted into 175 μL of 1× PBST, pH 7.4 for medium expressors and 100 μL of cell culture supernatant was diluted into 100 μL of 1× PBST, pH 7.4 for low expressors for loading onto the sensor tips. Diluted supernatants were then captured on an anti-human Fc sensor (Forte Bio). A baseline was established using 1× PBST (50 mM Potassium Phosphate Buffer+150 mM NaCl+0.05% Tween 20) pH 7.4, and the sensor was associated with 50 nM of CD22 (Sino Biological Cat. No. 11958-H08H) in 1× PBST pH 7.4 for 120 sec to generate an association curve. In the dissociation phase, the antibody-antigen complex on the sensor was exposed to 1× PBST pH 7.4 for 300-600 sec. Baseline, association, and dissociation were repeated using 1× PBST pH 5.4 throughout in a separate condition. Association and dissociation phase curves were examined for the starting ABPC antibody (with no substitutions) and each corresponding antibody variant at pH 5.4 and pH 7.4 to inform on two criteria: a) enhanced dissociation (i.e., higher koff values) at pH 5.4 due to histidine or alanine substitution compared to the starting ABPC (with no substitutions), and b) reduced dissociation at pH 7.4 (i.e., lower koff values) compared to pH 5.4 in the antibody variant itself and with the starting ABPC (with no substitutions). Heavy chain combinations variants that showed either enhanced dissociation at pH 5.4 or reduced dissociation at pH 7.4 or both (as compared to the starting ABPC), as shown in FIG. 32 were selected for further analysis (e.g, MYT4070, MYT4072, MYT4073, MYT4074, MYT4075, MYT4076, MYT4077, MYT4078, MYT4079, MYT4081, MYT4082, and MYT4087).

### Example 25

### Construction and Screening of pH-Engineered CD22 ABPCs

[0691] Multiple CD22-binding monoclonal antibodies have been described in the literature and can be used as a template for engineering pH-dependent binding (Zammarchi, F et al. “ADCT-602 (hLL2-cys-PBD), a new site-specifically conjugated, pyrrolobenzodiazepine (PBD) dimer-based antibody drug conjugate (ADC) targeting CD22-expressing B-cell malignancies” Poster presented at the American Society of Hematology 2016 Annual Meeting). We selected ADCT-602 (Heavy chain SEQ ID NO: 366, Light chain SEQ ID NO: 367) as a CD22-binding monoclonal antibody for pH engineering via histidine scanning. Briefly, CDRs in the heavy chain were identified using the methods described by Kabat et al (Kabat et al. (1992) Sequences of Proteins of Immunological Interest, DIANE publishing) and IMGT (Lefranc M P (1999) “The IMGT unique numbering for Immunoglobulins, T cell receptors and Ig-like domains” The Immunologist 7, 132-136), and for each CDR, residues falling under either or both Kabat and IMGT CDR definitions were called as CDR residues. To generate pH-dependent sequence variants, individual amino acid residues within the heavy chain CDRs were systematically substituted with a histidine, one at a time (MYT1496-MYT1531). In cases where the starting CDR residue was a histidine, it was mutated to an alanine. Antibody variants with only one histidine or alanine mutation in a heavy chain CDR were generated by co-transfection of Expi293 cells with a) one heavy chain sequence variant, and b) the corresponding starting ABPC light chain using methods known to the art. After allowing for four days of protein expression, cell culture supernatants were collected, quantified by SDS-PAGE analysis (FIG. 33), and the pH dependence of the variant was evaluated using biolayer interferometry (BLI) on an Octet RED 96e instrument. Briefly, cell culture supernatants were diluted based on qualitative expression level of the variant determined by visual examination of SDS-PAGE gels, 5 μL of cell culture supernatant was diluted into 195 μL of 1× PBST, pH 7.4 for high expressors, 25 μL of cell culture supernatant was diluted into 175 μL of 1× PBST, pH 7.4 for medium expressors and 100 μL of cell culture supernatant was diluted into 100 μL of 1× PBST, pH 7.4 for low expressors for loading onto the sensor tips. Diluted supernatants were then captured on an anti-human Fc sensor (Forte Bio). A baseline was established using 1× PBST (50 mM Potassium Phosphate Buffer+150 mM NaCl+0.05% Tween 20) pH 7.4, and the sensor was associated with 50 nM of CD22 (CD22 Protein (His Tag), Sino Biological Cat. No. 11958-H08H) in 1× PBST pH 7.4 for 120 sec to generate an association curve. In the dissociation phase, the antibody-antigen complex on the sensor was exposed to 1× PBST pH 7.4 for 180 sec. Baseline, association, and dissociation were repeated using 1× PBST (50 mM Potassium Phosphate Buffer+150 mM NaCl+0.05% Tween 20) pH 5.4 throughout in a separate condition. Association and dissociation phase curves were examined for the starting ABPC (with no substitutions) antibody and each corresponding antibody variant at pH 5.4 and pH 7.4 to inform on two criteria: a) enhanced dissociation (i.e., higher koff values) at pH 5.4 due to histidine or alanine substitution compared to the starting ABPC (with no substitutions), and b) reduced dissociation at pH 7.4 (i.e., lower koff values) compared to pH 5.4 in the antibody variant itself and with the starting ABPC (with no substitutions). Heavy chain variants that showed either enhanced dissociation at pH 5.4 or reduced dissociation at pH 7.4 or both (as compared to the starting ABPC), as shown in FIG. 34 were selected for further analysis (e.g, MYT1502, and MYT1503). It was also noted that while some histidine and alanine mutations obliterated CD22 binding (e.g., MYT1496, MYT1497, MYT1498, MYT1499, MYT1504, MYT1505, MYT1506, MYT1507, MYT1508, MYT1509, MYT1513, MYT1521, MYT1523, MYT1525, MYT1526, MYT1527, and MYT1529), others were tolerated with little (e.g., less than 1-fold change in dissociation constant KD or dissociation rate) or no change in CD22 binding kinetics (e.g., MYT1500, MYT1501, MYT1512, MYT1514, MYT1515, MYT1516, MYT1517, MYT1518, MYT1519, MYT1520, MYT1522, MYT1524, MYT1528, and MYT1531). Especially because histidine is a large, positively charged amino acid, these variants with no change were noted as positions in the heavy chain that may tolerate a wide range of mutations and lead to antibodies with different sequence but similar binding properties, a designation that is not otherwise apparent.

### Example 26

### Construction and Screening of pH-Engineered CD22 ABPCs

[0692] Multiple CD22-binding monoclonal antibodies have been described in the literature and can be used as a template for engineering pH-dependent binding (King, D J et al. “Human Antibodies That Bind CD22 and Uses Thereof” U.S. Pat. No. 8,481,683 (2013)). We selected 12C5 (Heavy chain SEQ ID NO: 410, Light chain SEQ ID NO: 411) as a CD22-binding monoclonal antibody for pH engineering via histidine scanning. Briefly, CDRs in the heavy chain were identified using the methods described by Kabat et al (Kabat et al. (1992) Sequences of Proteins of Immunological Interest, DIANE publishing) and IMGT (Lefranc M P (1999) “The IMGT unique numbering for Immunoglobulins, T cell receptors and Ig-like domains” The Immunologist 7, 132-136), and for each CDR, residues falling under either or both Kabat and IMGT CDR definitions were called as CDR residues. To generate pH-dependent sequence variants, individual amino acid residues within the heavy chain CDRs were systematically substituted with a histidine, one at a time (MYT4614-MYT4653). In cases where the starting CDR residue was a histidine, it was mutated to an alanine. Antibody variants with only one histidine or alanine mutation in a heavy chain CDR were generated by co-transfection of Expi293 cells with a) one heavy chain sequence variant, and b) the corresponding starting ABPC light chain using methods known to the art. After allowing for four days of protein expression, cell culture supernatants were collected, quantified by SDS-PAGE analysis (FIG. 35), and the pH dependence of the variant was evaluated using biolayer interferometry (BLI) on an Octet RED 96e instrument. Briefly, cell culture supernatants were diluted based on qualitative expression level of the variant determined by visual examination of SDS-PAGE gels, 5 μL of cell culture supernatant was diluted into 195 μL of 1× PBST, pH 7.4 for high expressors, 25 μL of cell culture supernatant was diluted into 175 μL of 1× PBST, pH 7.4 for medium expressors and 100 μL of cell culture supernatant was diluted into 100 μL of 1× PBST, pH 7.4 for low expressors for loading onto the sensor tips. Diluted supernatants were then captured on an anti-human Fc sensor (Forte Bio). A baseline was established using 1× PBST (50 mM Potassium Phosphate Buffer+150 mM NaCl+0.05% Tween 20) pH 7.4, and the sensor was associated with 50 nM of CD22 (CD22 Protein (His Tag), Sino Biological Cat. No. 11958-H08H) in 1× PBST pH 7.4 for 120 sec to generate an association curve. In the dissociation phase, the antibody-antigen complex on the sensor was exposed to 1× PBST pH 7.4 for 180 sec. Baseline, association, and dissociation were repeated using 1× PBST (50 mM Potassium Phosphate Buffer+150 mM NaCl+0.05% Tween 20) pH 5.4 throughout in a separate condition. Association and dissociation phase curves were examined for the starting ABPC (with no substitutions) antibody and each corresponding antibody variant at pH 5.4 and pH 7.4 to inform on two criteria: a) enhanced dissociation (i.e., higher koff values) at pH 5.4 due to histidine or alanine substitution compared to the starting ABPC (with no substitutions), and b) reduced dissociation at pH 7.4 (i.e., lower koff values) compared to pH 5.4 in the antibody variant itself and with the starting ABPC (with no substitutions). Heavy chain variants that showed either enhanced dissociation at pH 5.4 or reduced dissociation at pH 7.4 or both (as compared to the starting ABPC), as shown in FIG. 36 were selected for further analysis (e.g, MYT4618, MYT4620, MYT4623, MYT4627, MYT4629, MYT4630, MYT4631, MYT4632, MYT4635, MYT4636, MYT4644, MYT4645, MYT4647, MYT4648, and MYT4652). It was also noted that while some histidine and alanine mutations obliterated CD22 binding (e.g., MYT4624, MYT4626, MYT4649, MYT4650, and MYT4651), others were tolerated with little (e.g., less than 1-fold change in dissociation constant KD or dissociation rate) or no change in CD22 binding kinetics (e.g., MYT4614, MYT4616, MYT4617, MYT4619, MYT4621, MYT4622, MYT4625, MYT4628, MYT4633, MYT4634, MYT4638, MYT4639, MYT4640, MYT4641, MYT4642, MYT4643, and MYT4653). Especially because histidine is a large, positively charged amino acid, these variants with no change were noted as positions in the heavy chain that may tolerate a wide range of mutations and lead to antibodies with different sequence but similar binding properties, a designation that is not otherwise apparent.

### Example 27

### Construction and Screening of pH-Engineered CD22 ABPCs

[0693] Multiple CD22-binding monoclonal antibodies have been described in the literature and can be used as a template for engineering pH-dependent binding (King, D J et al. “Human Antibodies That Bind CD22 and Uses Thereof” U.S. Pat. No. 8,481,683 (2013)). We selected 12C5 (Heavy chain SEQ ID NO: 410, Light chain SEQ ID NO: 411) as a CD22-binding monoclonal antibody for pH engineering via histidine scanning. Briefly, CDRs in the light chain were identified using the methods described by Kabat et al (Kabat et al. (1992) Sequences of Proteins of Immunological Interest, DIANE publishing) and IMGT (Lefranc M P (1999) “The IMGT unique numbering for Immunoglobulins, T cell receptors and Ig-like domains” The Immunologist 7, 132-136), and for each CDR, residues falling under either or both Kabat and IMGT CDR definitions were called as CDR residues. To generate pH-dependent sequence variants, individual amino acid residues within the light chain CDRs were systematically substituted with a histidine, one at a time (MYT4654-MYT4684). In cases where the starting CDR residue was a histidine, it was mutated to an alanine. Antibody variants with only one histidine or alanine mutation in a light chain CDR were generated by co-transfection of Expi293 cells with a) one light chain sequence variant, and b) the corresponding starting ABPC heavy chain using methods known to the art. After allowing for four days of protein expression, cell culture supernatants were collected, quantified by SDS-PAGE analysis (FIG. 37), and the pH dependence of the variant was evaluated using biolayer interferometry (BLI) on an Octet RED96e instrument. Briefly, cell culture supernatants were diluted based on qualitative expression level of the variant determined by visual examination of SDS-PAGE gels, 5 μL of cell culture supernatant was diluted into 195 μL of 1× PBST, pH 7.4 for high expressors, 25 μL of cell culture supernatant was diluted into 175 μL of 1× PBST, pH 7.4 for medium expressors and 100 μL of cell culture supernatant was diluted into 100 μL of 1× PBST, pH 7.4 for low expressors for loading onto the sensor tips. Diluted supernatants were then captured on an anti-human Fc sensor (Forte Bio). A baseline was established using 1× PBST (50 mM Potassium Phosphate Buffer+150 mM NaCl+0.05% Tween 20) pH 7.4, and the sensor was associated with 50 nM of CD22 (Sino Biological Cat. No. 11958-H08H) in 1× PBST pH 7.4 for 120 sec to generate an association curve. In the dissociation phase, the antibody-antigen complex on the sensor was exposed to 1× PBST pH 7.4 for 300-600 sec. Baseline, association, and dissociation were repeated using 1× PBST pH 5.4 throughout in a separate condition. Association and dissociation phase curves were examined for the starting ABPC antibody (with no substitutions) and each corresponding antibody variant at pH 5.4 and pH 7.4 to inform on two criteria: a) enhanced dissociation (i.e., higher koff values) at pH 5.4 due to histidine or alanine substitution compared to the starting ABPC (with no substitutions), and b) reduced dissociation at pH 7.4 (i.e., lower koff values) compared to pH 5.4 in the antibody variant itself and with the starting ABPC (with no substitutions). Light chain variants that showed either enhanced dissociation at pH 5.4 or reduced dissociation at pH 7.4 or both (as compared to the starting ABPC), as shown in FIG. 38 were selected for further analysis (e.g, MYT4655, MYT4659, MYT4660, MYT4661, MYT4665, MYT4666, MYT4668, MYT4669, MYT4673, MYT4675, MYT4676, MYT4677, and MYT4683). It was also noted that some histidine and alanine mutations were tolerated with little (e.g., less than 1-fold change in dissociation constant KD or dissociation rate) or no change in CD22 binding kinetics (e.g., MYT4654, MYT4656, MYT4657, MYT4658, MYT4662, MYT4663, MYT4664, MYT4667, MYT4670, MYT4671, MYT4672, MYT4674, MYT4678, MYT4679, MYT4680, MYT4681, MYT4682, and MYT4684). Especially because histidine is a large, positively charged amino acid, these variants with no change were noted as positions in the light chain that may tolerate a wide range of mutations and lead to antibodies with different sequence but similar binding properties, a designation that is not otherwise apparent.

### Example 28

### Construction and Screening of pH-Engineered CD22 ABPCs

[0694] Multiple CD22-binding monoclonal antibodies have been described in the literature and can be used as a template for engineering pH-dependent binding (King, D J et al. “Human Antibodies That Bind CD22 and Uses Thereof” U.S. Pat. No. 8,481,683 (2013)). We selected 19A3 (Heavy chain SEQ ID NO: 489, Light chain SEQ ID NO: 490) as a CD22-binding monoclonal antibody for pH engineering via histidine scanning. Briefly, CDRs in the heavy chain were identified using the methods described by Kabat et al (Kabat et al. (1992) Sequences of Proteins of Immunological Interest, DIANE publishing) and IMGT (Lefranc M P (1999) “The IMGT unique numbering for Immunoglobulins, T cell receptors and Ig-like domains” The Immunologist 7, 132-136), and for each CDR, residues falling under either or both Kabat and IMGT CDR definitions were called as CDR residues. To generate pH-dependent sequence variants, individual amino acid residues within the heavy chain CDRs were systematically substituted with a histidine, one at a time (MYT4686-MYT4725, and MYT4808-MYT4812). In cases where the starting CDR residue was a histidine, it was mutated to an alanine. Antibody variants with only one histidine or alanine mutation in a heavy chain CDR were generated by co-transfection of Expi293 cells with a) one heavy chain sequence variant, and b) the corresponding starting ABPC light chain using methods known to the art. After allowing for four days of protein expression, cell culture supernatants were collected, quantified by SDS-PAGE analysis (FIG. 39), and the pH dependence of the variant was evaluated using biolayer interferometry (BLI) on an Octet RED 96e instrument. Briefly, cell culture supernatants were diluted based on qualitative expression level of the variant determined by visual examination of SDS-PAGE gels, 5 μL of cell culture supernatant was diluted into 195 μL of 1× PBST, pH 7.4 for high expressors, 25 μL of cell culture supernatant was diluted into 175 μL of 1× PBST, pH 7.4 for medium expressors and 100 μL of cell culture supernatant was diluted into 100 μL of 1× PBST, pH 7.4 for low expressors for loading onto the sensor tips. Diluted supernatants were then captured on an anti-human Fc sensor (Forte Bio). A baseline was established using 1× PBST (50 mM Potassium Phosphate Buffer+150 mM NaCl+0.05% Tween 20) pH 7.4, and the sensor was associated with 50 nM of CD22 (Sino Biological Cat. No. 11958-H08H) in 1× PBST pH 7.4 for 120 sec to generate an association curve. In the dissociation phase, the antibody-antigen complex on the sensor was exposed to 1× PBST pH 7.4 for 180 sec. Baseline, association, and dissociation were repeated using 1× PBST (50 mM Potassium Phosphate Buffer+150 mM NaCl+0.05% Tween 20) pH 5.4 throughout in a separate condition. Association and dissociation phase curves were examined for the starting ABPC (with no substitutions) antibody and each corresponding antibody variant at pH 5.4 and pH 7.4 to inform on two criteria: a) enhanced dissociation (i.e., higher koff values) at pH 5.4 due to histidine or alanine substitution compared to the starting ABPC (with no substitutions), and b) reduced dissociation at pH 7.4 (i.e., lower koff values) compared to pH 5.4 in the antibody variant itself and with the starting ABPC (with no substitutions). Heavy chain variants that showed either enhanced dissociation at pH 5.4 or reduced dissociation at pH 7.4 or both (as compared to the starting ABPC), as shown in FIG. 40 were selected for further analysis (e.g, MYT4687, MYT4689, MYT4690, MYT4694, MYT4695, MYT4697, MYT4716, MYT4717, MYT4719, MYT4721, MYT4722, MYT4724, MYT4811, and MYT4812). It was also noted that while some histidine and alanine mutations obliterated CD22 binding (e.g., MYT4715, MYT4718, MYT4720, MYT4723, and MYT4808), others were tolerated with little (e.g., less than 1-fold change in dissociation constant KD or dissociation rate) or no change in CD22 binding kinetics (e.g., MYT4686, MYT4688, MYT4691, MYT4692, MYT4693, MYT4696, MYT4698, MYT4699, MYT4700, MYT4701, MYT4702, MYT4703, MYT4704, MYT4705, MYT4706, MYT4707, MYT4708, MYT4709, MYT4710, MYT4711, MYT4712, MYT4713, MYT4714, MYT4725, MYT4809, and MYT4810). Especially because histidine is a large, positively charged amino acid, these variants with no change were noted as positions in the heavy chain that may tolerate a wide range of mutations and lead to antibodies with different sequence but similar binding properties, a designation that is not otherwise apparent.

### Example 29

### Construction and Screening of pH-Engineered CD22 ABPCs

[0695] Multiple CD22-binding monoclonal antibodies have been described in the literature and can be used as a template for engineering pH-dependent binding (King, D J et al. “Human Antibodies That Bind CD22 and Uses Thereof” U.S. Pat. No. 8,481,683 (2013)). We selected 19A3 (Heavy chain SEQ ID NO: 489, Light chain SEQ ID NO: 490) as a CD22-binding monoclonal antibody for pH engineering via histidine scanning. Briefly, CDRs in the light chain were identified using the methods described by Kabat et al (Kabat et al. (1992) Sequences of Proteins of Immunological Interest, DIANE publishing) and IMGT (Lefranc M P (1999) “The IMGT unique numbering for Immunoglobulins, T cell receptors and Ig-like domains” The Immunologist 7, 132-136), and for each CDR, residues falling under either or both Kabat and IMGT CDR definitions were called as CDR residues. To generate pH-dependent sequence variants, individual amino acid residues within the light chain CDRs were systematically substituted with a histidine, one at a time (MYT4726-MYT4751). In cases where the starting CDR residue was a histidine, it was mutated to an alanine. Antibody variants with only one histidine or alanine mutation in a light chain CDR were generated by co-transfection of Expi293 cells with a) one light chain sequence variant, and b) the corresponding starting ABPC heavy chain using methods known to the art. After allowing for four days of protein expression, cell culture supernatants were collected, quantified by SDS-PAGE analysis (FIG. 41), and the pH dependence of the variant was evaluated using biolayer interferometry (BLI) on an Octet RED96e instrument. Briefly, cell culture supernatants were diluted based on qualitative expression level of the variant determined by visual examination of SDS-PAGE gels, 5 μL of cell culture supernatant was diluted into 195 μL of 1× PBST, pH 7.4 for high expressors, 25 μL of cell culture supernatant was diluted into 175 μL of 1× PBST, pH 7.4 for medium expressors and 100 μL of cell culture supernatant was diluted into 100 μL of 1× PBST, pH 7.4 for low expressors for loading onto the sensor tips. Diluted supernatants were then captured on an anti-human Fc sensor (Forte Bio). A baseline was established using 1× PBST (50 mM Potassium Phosphate Buffer+150 mM NaCl+0.05% Tween 20) pH 7.4, and the sensor was associated with 50 nM of CD22 (Sino Biological Cat. No. 11958-H08H) in 1× PBST pH 7.4 for 120 sec to generate an association curve. In the dissociation phase, the antibody-antigen complex on the sensor was exposed to 1× PBST pH 7.4 for 300-600 sec. Baseline, association, and dissociation were repeated using 1× PBST pH 5.4 throughout in a separate condition. Association and dissociation phase curves were examined for the starting ABPC antibody (with no substitutions) and each corresponding antibody variant at pH 5.4 and pH 7.4 to inform on two criteria: a) enhanced dissociation (i.e., higher koff values) at pH 5.4 due to histidine or alanine substitution compared to the starting ABPC (with no substitutions), and b) reduced dissociation at pH 7.4 (i.e., lower koff values) compared to pH 5.4 in the antibody variant itself and with the starting ABPC (with no substitutions). Light chain variants that showed either enhanced dissociation at pH 5.4 or reduced dissociation at pH 7.4 or both (as compared to the starting ABPC), as shown in FIG. 42 were selected for further analysis (e.g, MYT4742, and MYT4743). It was also noted that some histidine and alanine mutations were tolerated with little (e.g., less than 1-fold change in dissociation constant KD or dissociation rate) or no change in CD22 binding kinetics (e.g., MYT4726, MYT4727, MYT4728, MYT4729, MYT4730, MYT4731, MYT4732, MYT4733, MYT4734, MYT4735, MYT4736, MYT4737, MYT4738, MYT4739, MYT4740, MYT4741, MYT4744, MYT4745, MYT4746, MYT4747, MYT4748, MYT4749, MYT4750, and MYT4751). Especially because histidine is a large, positively charged amino acid, these variants with no change were noted as positions in the light chain that may tolerate a wide range of mutations and lead to antibodies with different sequence but similar binding properties, a designation that is not otherwise apparent.

### Example 30

### Characterization of Cellular Internalization and Endolysosomal Delivery of pH Engineered Anti-CD22 ABPCs

[0696] Selected anti-CD22 pH engineered antibody variants from Examples 12-16 and 18-24 were analyzed for internalization and endolysosomal delivery in Ramos (CD22+) cells. Ramos cells (ATCC CRL-1596) were collected and resuspended in RPMI-1640 medium (ATCC; 30-2001)+10% GenClone heat inactivated fetal bovine serum (HI FBS) (Genesee Scientific; 25-514H). Cell counts were determined using trypan blue staining and the Countess II FL Automated Cell Counter (Thermofisher; AMQAF1000). Cells were then diluted to 2,000,000 cells/mL and 50 μl/well was seeded into 96-well flat bottom cell culture plates (Genesee Scientific; 25-109). Anti-CD22 pH engineered antibody variants, starting ABPC antibodies, control IgG1 isotype control (BP0297, Bioxcell), and vehicle control were diluted in native culture media to 100 nM and then mixed 1:1 with 300 nM Zenon pHrodo iFL Human IgG Labeling Reagent (ThermoFisher; Z25611). The mixture was incubated for 20 minutes at room temperature, followed by addition of 50 μL to cells. The mixture of cells, anti-CD22 antibody variants, and Zenon pHrodo iFL Human IgG Labeling Reagent was incubated at 37° C., 5% CO2 for 1-24 hours. Following incubation, 100 μL of ice cold Flow Cytometry (FC) buffer (phosphate buffered saline (PBS), pH 7.4+2 mM ethylenediaminetetraacetic acid (EDTA)+2% (v/v) HI FBS is added to each well. Cells were then spun down at 4° C. for 2 min at 2000 rpm, washed with 200 μL ice cold FC buffer and resuspended in 100 μL ice cold FC buffer. Mean green fluorescence intensity was detected using a BD Accuri C6 flow cytometer. Data was analyzed using Flowjo analysis software. pHrodo green is a pH sensitive dye that fluoresces in the low pH environment of the endosomes and lysosomes and therefore can be used to quantify antibody internalization and endolysosomal delivery. Internalization and endolysosomal delivery of anti-CD22 starting ABPC's and variants in Ramos (CD22+) cells is shown in FIG. 60 as measured by pHrodo green mean fluorescence intensity. Several pH engineered anti-CD22 antibody variants showed increased mean fluorescence intensity relative to their corresponding starting ABPC antibodies demonstrating that increased dissociation at lower pH leads to enhanced internalization and endolysosomal delivery inside cells as shown by increased fluorescence or increased fluorescence as compared to IgG1 isotype control. Increased endolysosomal delivery is quantitated for each pH engineered anti-CD22 antibody variant on the top of each bar as a ratio of: the variant's mean fluorescence intensity minus the mean fluorescence intensity of the IgG control, then all divided by the variant's corresponding starting ABPC's mean fluorescence intensity minus the mean fluorescence intensity of the IgG control. For example MYT0520, MYT0526, MYT0536, MYT0544, and MYT0550, antibody variants of inotuzumab, show increased internalization and endolysosomal delivery relative to inotuzumab (MYT0518). Such pH engineered anti-CD22 antibody variants with increased mean fluorescence intensity relative to their starting ABPC antibodies were selected for further analysis (MYT0520, MYT0526, MYT0536, MYT0544, MYT0550, MYT1648, MYT1651, MYT1653, MYT1654, MYT1668, MYT1623, MYT1632, MYT1635, MYT1636, MYT1637, MYT4405, MYT4412, MYT4414, MYT4415, MYT4420, MYT4424, MYT4425, MYT4433, MYT4434, MYT4435, MYT4437, MYT1295, MYT1303, MYT1304, MYT1307, MYT1311, MYT1313, MYT1322, MYT1325, MYT1326, MYT1328, MYT1330, MYT1331, MYT2681, MYT2691, MYT2706, MYT2713, MYT2716, MYT2720, MYT4440, MYT4445, MYT4446, MYT4447, MYT4448, MYT2276, MYT4074, MYT4075, MYT4076, MYT4082, and MYT4087).

### Example 31

### Characterization of Cellular Internalization and Endolysosomal Delivery of pH Engineered Anti-CD22 ABPCs

[0697] Selected anti-CD22 pH engineered antibody variants from Example 18 were analyzed for internalization and endolysosomal delivery in Ramos, WSU-DLCL2, MHH-PREB-1, and Raji (CD22+) cells. Ramos cells (ATCC CRL-1596), WSU-DLCL2 cells (DSMZ ACC-575), MHH-PREB-1 cells (DSMZ ACC 354) or Raji cells (ATCC CCL-86) were collected and resuspended in RPMI-1640 medium (ATCC; 30-2001)+10% GenClone heat inactivated fetal bovine serum (HI FBS) (Genesee Scientific; 25-514H) as specified in the figures. Cell counts were determined using trypan blue staining and the Countess II FL Automated Cell Counter (Thermofisher; AMQAF1000). Cells were then diluted to 2,000,000 cells/mL and 50 μl/well was seeded into 96-well flat bottom cell culture plates (Genesee Scientific; 25-109). Anti-CD22 pH engineered antibody variants, starting ABPC antibodies, control IgG1 isotype control (BP0297, Bioxcell), and vehicle control were diluted in native culture media to 100 nm or 20 nM and then mixed 1:1 with 300 nM Zenon pHrodo iFL Human IgG Labeling Reagent (ThermoFisher; Z25611). The mixture was incubated for 20 minutes at room temperature, followed by addition of 50 μL to cells, resulting in a final concentration of the anti-CD22 pH engineered antibody variants or starting ABPC of 5 nM or 25 nM as specified in the figures. The mixture of cells, anti-CD22 antibody variants, and Zenon pHrodo iFL Human IgG Labeling Reagent was incubated at 37° C., 5% CO2 for 1-24 hours. Following incubation, 100 μL of ice cold Flow Cytometry (FC) buffer (phosphate buffered saline (PBS), pH 7.4+2 mM ethylenediaminetetraacetic acid (EDTA)+2% (v/v) HI FBS is added to each well. Cells were then spun down at 4° C. for 2 min at 2000 rpm, washed with 200 μL ice cold FC buffer and resuspended in 100 μL ice cold FC buffer. Mean green fluorescence intensity was detected using a BD Accuri C6 flow cytometer. Data was analyzed using Flowjo analysis software. pHrodo green is a pH sensitive dye that fluoresces in the low pH environment of the endosomes and lysosomes and therefore can be used to quantify antibody internalization and endolysosomal delivery. Internalization and endolysosomal delivery of anti-CD22 starting ABPC's and variants in CD22+ cells is shown in FIG. 61a-d as measured by pHrodo green mean fluorescence intensity. MYT1331 showed increased mean fluorescence intensity relative to it's corresponding starting ABPC, demonstrating that increased dissociation at lower pH leads to enhanced internalization and endolysosomal delivery inside cells as shown by increased fluorescence or increased fluorescence as compared to IgG1 isotype control. Increased endolysosomal delivery is quantitated for each pH engineered anti-CD22 antibody variant on the top of each bar as a ratio of: the variant's mean fluorescence intensity minus the mean fluorescence intensity of the IgG control, then all divided by the variant's corresponding starting ABPC's mean fluorescence intensity minus the mean fluorescence intensity of the IgG control. For example MYT1331, a variant of pinatuzumab, shows increased internalization and endolysosomal delivery relative to pinatuzumab (MYT1293).

### Example 32

### Surface Expression of CD22

[0698] Selected CD22+ cell lines were analyzed for cell surface expression of CD22. Ramos cells (ATCC CRL-1596), WSU-DLCL2 cells (DSMZ ACC-575), MHH-PREB-1 cells (DSMZ ACC 354) or Raji cells (ATCC CCL-86) were collected and resuspended in RPMI-1640 medium (ATCC; 30-2001)+10% GenClone heat inactivated fetal bovine serum (HI FBS) (Genesee Scientific; 25-514H) as specified in the figures. Cell counts were determined using trypan blue staining and the Countess II FL Automated Cell Counter (Thermofisher; AMQAF1000). Cells were then diluted to 1,000,000 cells/mL and 100 μl/well was seeded into 96-well flat bottom cell culture plates (Genesee Scientific; 25-109). Anti-CD22 antibody (BioLegend Cat. No. 302506) was added to the cells at the manufacturer's recommended concentration and incubated for 30 minutes at 4° C. Cells were then spun down at 4° C. for 2 min at 2000 rpm, washed with 200 μL ice cold FC buffer and resuspended in 100 μL ice cold FC buffer, this was repeated once for a total of two washes. Immediately prior to acquisition Quantibrite beads (BD Biosciences 340495) were prepared according to the manufacturer's instructions in sterile water. Mean green fluorescence intensity was detected using a BD Accuri C6 flow cytometer. Data was analyzed using Flowjo analysis software, calculations for antibodies bound per cell were performed according to the Quantibrite Bead manufacturers instructions. FIG. 62a shows antibodies bound per cell for the various cells lines as specified in the figure. FIG. 62b shows the correlation between uptake of MYT1293 (pinatuzumab) from example 31 and the CD22 antibodies bound per cell.

### Example 33

### Characterization of Binding Affinity for Anti-CD22 mAbs

[0699] Binding affinity of selected anti-CD22 pH engineered antibody variants from Examples 14 and 18 were measured on Ramos (CD22+) cells. 100,000 cells per well were resuspended in 900 μL FC buffer in a 96 well deep well plate. Pinatuzumab, Inotuzumab, and pH engineered antibody variants were serially diluted at a 1:3 dilution. 100 μL of diluted antibody was added to each well with final concentration ranging from ˜100 nM to 0.024 pM and incubated for 2 hours at 4° C. Post incubation, the cells were spun at 2000 rpm for 2 min and supernatant was discarded. Cells were washed twice with 500 μL of ice-cold FC buffer and resuspended with 100 μL of FC buffer. The cells were then transferred from the deep well plate to 96 well round bottom plate, spun at 2000 rpm for 2 min and incubated with 100 μL of 10 μg/mL Alexa Fluor 488 conjugated goat anti-human IgG secondary antibody (ThermoFisher Scientific, A11013) for 30 min. Post incubation, cells were washed with FC buffer and resuspended in 100 μL of FC buffer to read on a BD Accuri C6 flow cytometer. Mean fluorescence intensity at each concentration per sample was background subtracted and plotted as shown in FIG. 63. Binding affinity was measured as a dissociation constant KD by GraphPad Prism assuming Michaelis-Menten binding kinetics. MYT1331, MYT4405 and MYT4424 show high affinity binding to cell surface CD22 on Ramos cells in the pM-nM range confirming that variants created through pH engineering can retain functionally appropriate affinities as compared to their corresponding starting ABPCs (e.g., inotuzumab or pinatuzumab). Variants with dissociation constants KD less than 100 nM were selected for further analysis.

[0700] The discoveries herein are in contrast to similar engineering on other antigens such as CLEC12a and two other targets wherein multiple variants per target showed enhanced dissociation at low pH, however, despite the favorable pH-dependent binding properties of these variants (which specifically bound CLEC12a and the two other targets), they had less than 10% increase in cell internalization and endolysosomal delivery as compared to the corresponding starting ABPC (e.g., the starting antibody). These variants (which specifically bound CLEC12a and the two other targets) also had similar biophysical characteristics (e.g., antibody expression, thermal stability, affinity at pH 7.4 etc.) to the corresponding starting ABPC (e.g., the starting antibody) confirming that this was not specific to the biophysical properties of the tested variant (i.e. the biophysical properties unrelated to enhanced dissociation at pH 5.4).

### Exemplary Embodiments

[0701] Embodiment 1 is a pharmaceutical composition comprising an effective amount of an antigen-binding protein construct (ABPC) comprising: a first antigen-binding domain that is capable of specifically binding CD22 or an epitope of CD22 presented on the surface of a target mammalian cell, wherein: (a) the dissociation rate of the first antigen-binding domain at a pH of about 4.0 to about 6.5 is faster than the dissociation rate at a pH of about 7.0 to about 8.0; or
[0702] (b) the dissociation constant (KD) of the first antigen-binding domain at a pH of about 4.0 to about 6.5 is greater than the KD at a pH of about 7.0 to about 8.0.

[0703] Embodiment 2 is the pharmaceutical composition of embodiment 1, wherein the first antigen-binding domain comprises a heavy chain variable domain of inotuzumab with one or more amino acids substituted with a histidine.

[0704] Embodiment 3 is the pharmaceutical composition of embodiment 1, wherein the first antigen-binding domain comprises a light chain variable domain of inotuzumab with one or more amino acids substituted with a histidine.

[0705] Embodiment 4 is the pharmaceutical composition of embodiment 1, wherein the first antigen-binding domain comprises: a heavy chain variable domain of inotuzumab with one or more amino acids substituted with a histidine; and a light chain variable domain of inotuzumab with one or more amino acids substituted with a histidine.

[0706] Embodiment 5 is the pharmaceutical composition of embodiment 2 or 4, wherein the heavy chain variable domain of inotuzumab comprises SEQ ID NO: 1.

[0707] Embodiment 6 is the pharmaceutical composition of embodiment 3 or 4, wherein the light chain variable domain of inotuzumab comprises SEQ ID NO: 2.

[0708] Embodiment 7 is the pharmaceutical composition of embodiment 1, wherein the first antigen-binding domain comprises a heavy chain variable domain comprising a CDR1, a CDR2, and a CDR3 of SEQ ID NOs: 3-5, respectively, with collectively a total of one or more amino acid positions in SEQ ID NOs: 3-5 substituted with a histidine.

[0709] Embodiment 8 is the pharmaceutical composition of embodiment 1, wherein the first CD22-binding domain comprises a light chain variable domain comprising a CDR1, a CDR2, and a CDR3 of SEQ ID NOs: 6-8, respectively, with collectively a total of one or more amino acid positions in SEQ ID NOs: 6-8 substituted with a histidine.

[0710] Embodiment 9 is the pharmaceutical composition of embodiment 1, wherein the first CD22-binding domain comprises: a heavy chain variable domain comprising a CDR1, a CDR2, and a CDR3 of SEQ ID NOs: 3-5, respectively, with collectively a total of one or more amino acid positions in SEQ ID NOs: 3-5 substituted with a histidine; and a light chain variable domain comprising a CDR1, a CDR2, and a CDR3 of SEQ ID NOs: 6-8, respectively, with collectively a total of one or more amino acid positions in SEQ ID NOs: 6-8 substituted with a histidine.

[0711] Embodiment 10 is the pharmaceutical composition of embodiment 1, 2, or 7, wherein the first antigen-binding domain comprises a heavy chain variable domain that is at least 90% identical to SEQ ID NO: 1, wherein the heavy chain variable domain includes a histidine at one or more positions in SEQ ID NO: 1 selected from the group consisting of: 27, 28, 30, 31, 33, 34, 50, 51, 52, 53, 55, 56, 57, 59, 60, 63, 97, 98, 103, 104, 108, and 110.

[0712] Embodiment 11 is the pharmaceutical composition of embodiment 1, 3, or 8, wherein the first antigen-binding domain comprises a light chain variable domain that is at least 90% identical to SEQ ID NO: 2, wherein the light chain variable domain includes a histidine at one or more positions in SEQ ID NO: 2 selected from the group consisting of: 25, 26, 28, 30, 33, 34, 35, 36, 38, 39, 55, 56, and 95.

[0713] Embodiment 12 is the pharmaceutical composition of embodiment 1, 2, or 7, wherein the first antigen-binding domain comprises a heavy chain variable domain that is at least 90% identical to SEQ ID NO: 1, wherein the heavy chain variable domain includes a histidine at two or more positions in SEQ ID NO: 1 selected from the group consisting of: 31, 51, 56, 59, and 60.

[0714] Embodiment 13 is the pharmaceutical composition of embodiment 1, 4, or 9, wherein the first antigen-binding domain comprises: a heavy chain variable domain that is at least 90% identical to SEQ ID NO: 1, wherein the heavy chain variable domain includes a histidine at one or more positions in SEQ ID NO: 1 selected from the group consisting of: 27, 28, 30, 31, 33, 34, 50, 51, 52, 53, 55, 56, 57, 59, 60, 63, 97, 98, 103, 104, 108, and 110; and a light chain variable domain that is at least 90% identical to SEQ ID NO: 2, wherein the light chain variable domain includes a histidine at one or more positions in SEQ ID NO: 2 selected from the group consisting of: 25, 26, 28, 30, 33, 34, 35, 36, 38, 39, 55, 56, and 95.

[0715] Embodiment 14 is the pharmaceutical composition of embodiment 1, wherein the first antigen-binding domain comprises a heavy chain variable domain of SEQ ID NO: 14, SEQ ID NO: 15, SEQ ID NO: 17, SEQ ID NO: 18, SEQ ID NO: 20, SEQ ID NO: 21, SEQ ID NO: 23, SEQ ID NO: 24, SEQ ID NO: 25, SEQ ID NO: 26, SEQ ID NO: 28, SEQ ID NO: 29, SEQ ID NO: 30, SEQ ID NO: 32, SEQ ID NO: 33, SEQ ID NO: 36, SEQ ID NO: 38, SEQ ID NO: 39, SEQ ID NO: 44, SEQ ID NO: 45, SEQ ID NO: 49, or SEQ ID NO: 51.

[0716] Embodiment 15 is the pharmaceutical composition of embodiment 1 or 14, wherein the first antigen-binding domain comprises a light chain variable domain of SEQ ID NO: 2, SEQ ID NO: 53, SEQ ID NO: 54, SEQ ID NO: 56, SEQ ID NO: 58, SEQ ID NO: 61, SEQ ID NO: 62, SEQ ID NO: 63, SEQ ID NO: 64, SEQ ID NO: 66, SEQ ID NO: 67, SEQ ID NO: 68, SEQ ID NO: 69, SEQ ID NO: 76, or SEQ ID NO: 79.

[0717] Embodiment 16 is the pharmaceutical composition of embodiment 1, wherein the first antigen-binding domain comprises a heavy chain variable domain SEQ ID NO: 84, SEQ ID NO: 85, SEQ ID NO: 86, SEQ ID NO: 87, SEQ ID NO: 88, SEQ ID NO: 89, SEQ ID NO: 90, SEQ ID NO: 91, SEQ ID NO: 92, SEQ ID NO: 93, SEQ ID NO: 94, SEQ ID NO: 95, SEQ ID NO: 96, SEQ ID NO: 97, SEQ ID NO: 98, SEQ ID NO: 99, SEQ ID NO: 100, SEQ ID NO: 101, SEQ ID NO: 102, or SEQ ID NO: 103.

[0718] Embodiment 17 is the pharmaceutical composition of embodiment 16, wherein the first antigen-binding domain comprises a light chain variable domain of SEQ ID NO: 2, SEQ ID NO: 53, SEQ ID NO: 54, SEQ ID NO: 56, SEQ ID NO: 58, SEQ ID NO: 61, SEQ ID NO: 62, SEQ ID NO: 63, SEQ ID NO: 64, SEQ ID NO: 66, SEQ ID NO: 67, SEQ ID NO: 68, SEQ ID NO: 69, SEQ ID NO: 76, or SEQ ID NO: 79.

[0719] Embodiment 18 the pharmaceutical composition of any one of embodiments 1-17, wherein the ABPC is degraded in the target mammalian cell following internalization of the ABPC by the target mammalian cell.

[0720] Embodiment 19 is the pharmaceutical composition of any one of embodiments 1-18, wherein the ABPC further comprises a conjugated toxin, radioisotope, drug, or small molecule.

[0721] Embodiment 20 is the pharmaceutical composition of embodiment 19, wherein the composition provides for an increase in toxin liberation in the target mammalian cell as compared to a composition comprising the same amount of a control ABPC.

[0722] Embodiment 21 is the pharmaceutical composition of embodiment 20, wherein the composition provides for at least a 20% increase in toxin liberation in the target mammalian cell as compared to a composition comprising the same amount of a control ABPC.

[0723] Embodiment 22 is the pharmaceutical composition of embodiment 21, wherein the composition provides for at least a 50% increase in toxin liberation in the target mammalian cell as compared to a composition comprising the same amount of a control ABPC.

[0724] Embodiment 23 is the pharmaceutical composition of embodiment 20, wherein the composition provides for at least a 2-fold increase in toxin liberation in the target mammalian cell as compared to a composition comprising the same amount of a control ABPC.

[0725] Embodiment 24 is the pharmaceutical composition of embodiment 23, wherein the composition provides for at least a 5-fold increase in toxin liberation in the target mammalian cell as compared to a composition comprising the same amount of a control ABPC.

[0726] Embodiment 25 is the pharmaceutical composition of any one of embodiments 19-24, wherein the composition provides for an increase in target mammalian cell killing as compared to a composition comprising the same amount of a control ABPC.

[0727] Embodiment 26 is the pharmaceutical composition of embodiment 25, wherein the composition provides for at least a 20% increase in target mammalian cell killing as compared to a composition comprising the same amount of a control ABPC.

[0728] Embodiment 27 is the pharmaceutical composition of embodiment 26, wherein the composition provides for at least a 50% increase in target mammalian cell killing as compared to a composition comprising the same amount of a control ABPC.

[0729] Embodiment 28 is the pharmaceutical composition of embodiment 25, wherein the composition provides for at least a 2-fold increase in target mammalian cell killing as compared to a composition comprising the same amount of a control ABPC.

[0730] Embodiment 29 is the pharmaceutical composition of embodiment 28, wherein the composition provides for at least a 5-fold increase in target mammalian cell killing as compared to a composition comprising the same amount of a control ABPC.

[0731] Embodiment 30 is the pharmaceutical composition of any one of embodiments 1-29, wherein the composition provides for an increase in endolysosomal delivery in the target mammalian cell as compared to a composition comprising the same amount of a control ABPC.

[0732] Embodiment 31 is the pharmaceutical composition of embodiment 30, wherein the composition provides for at least a 20% increase in endolysosomal delivery in the target mammalian cell as compared to a composition comprising the same amount of a control ABPC.

[0733] Embodiment 32 is the pharmaceutical composition of embodiment 31, wherein the composition provides for at least a 50% increase in endolysosomal delivery in the target mammalian cell as compared to a composition comprising the same amount of a control ABPC.

[0734] Embodiment 33 is the pharmaceutical composition of embodiment 30, wherein the composition provides for at least a 2-fold increase in endolysosomal delivery in the target mammalian cell as compared to a composition comprising the same amount of a control ABPC.

[0735] Embodiment 34 is the pharmaceutical composition of embodiment 33, wherein the composition provides for at least a 5-fold increase in endolysosomal delivery in the target mammalian cell as compared to a composition comprising the same amount of a control ABPC.

[0736] Embodiment 35 the pharmaceutical composition of any one of embodiments 1-34, wherein the composition results in a less of a reduction in the level of CD22 presented on the surface of the target mammalian cell as compared to a composition comprising the same amount of a control ABPC.

[0737] Embodiment 36 is the pharmaceutical composition of any one of embodiments 1-34, wherein the composition does not result in a detectable reduction in the level of the CD22 presented on the surface of the target mammalian cell.

[0738] Embodiment 37 is a pharmaceutical composition comprising an effective amount of an antigen-binding protein construct (ABPC) comprising: a first antigen-binding domain that is capable of specifically binding CD22 or an epitope of CD22 presented on the surface of a target mammalian cell; and a conjugated toxin, radioisotope, drug, or small molecule, wherein:
[0739] (a) the dissociation rate of the first antigen-binding domain at a pH of about 4.0 to about 6.5 is faster than the dissociation rate at a pH of about 7.0 to about 8.0; or the dissociation constant (KD) of the first antigen-binding domain at a pH of about 4.0 to about 6.5 is greater than the KD at a pH of about 7.0 to about 8.0; and (b) the composition provides for one or more of: an increase in toxin liberation in the target mammalian cell as compared to a composition comprising the same amount of a control ABPC; an increase in target mammalian cell killing as compared to a composition comprising the same amount of a control ABPC; and an increase in endolysosomal delivery in the target mammalian cell as compared to a composition comprising the same amount of a control ABPC.

[0740] Embodiment 38 is the pharmaceutical composition of embodiment 37, wherein the first antigen-binding domain comprises a heavy chain variable domain of inotuzumab with one or more amino acids substituted with a histidine.

[0741] Embodiment 39 is the pharmaceutical composition of embodiment 37, wherein the first antigen-binding domain comprises a light chain variable domain of inotuzumab with one or more amino acids substituted with a histidine.

[0742] Embodiment 40 is the pharmaceutical composition of embodiment 37, wherein the first antigen-binding domain comprises: a heavy chain variable domain of inotuzumab with one or more amino acids substituted with a histidine; and a light chain variable domain of inotuzumab with one or more amino acids substituted with a histidine.

[0743] Embodiment 41 is the pharmaceutical composition of embodiment 38 or 40, wherein the heavy chain variable domain of inotuzumab comprises SEQ ID NO: 1.

[0744] Embodiment 42 is the pharmaceutical composition of embodiment 39 or 40, wherein the light chain variable domain of inotuzumab comprises SEQ ID NO: 2.

[0745] Embodiment 43 is the pharmaceutical composition of embodiment 37, wherein the first antigen-binding domain comprises a heavy chain variable domain comprising a CDR1, a CDR2, and a CDR3 of SEQ ID NOs: 3-5, respectively, with collectively a total of one or more amino acid positions in SEQ ID NOs: 3-5 substituted with a histidine.

[0746] Embodiment 44 is the pharmaceutical composition of embodiment 37, wherein the first CD22-binding domain comprises a light chain variable domain comprising a CDR1, a CDR2, and a CDR3 of SEQ ID NOs: 6-8, respectively, with collectively a total of one or more amino acid positions in SEQ ID NOs: 6-8 substituted with a histidine.

[0747] Embodiment 45 is the pharmaceutical composition of embodiment 37, wherein the first CD22-binding domain comprises: a heavy chain variable domain comprising a CDR1, a CDR2, and a CDR3 of SEQ ID NOs: 3-5, respectively, with collectively a total of one or more amino acid positions in SEQ ID NOs: 3-5 substituted with a histidine; and a light chain variable domain comprising a CDR1, a CDR2, and a CDR3 of SEQ ID NOs: 6-8, respectively, with collectively a total of one or more amino acid positions in SEQ ID NOs: 6-8 substituted with a histidine.

[0748] Embodiment 46 is the pharmaceutical composition of embodiment 37, 38, or 43, wherein the first antigen-binding domain comprises a heavy chain variable domain that is at least 90% identical to SEQ ID NO: 1, wherein the heavy chain variable domain includes a histidine at one or more positions in SEQ ID NO: 1 selected from the group consisting of: 27, 28, 30, 31, 33, 34, 50, 51, 52, 53, 55, 56, 57, 59, 60, 63, 97, 98, 103, 104, 108, and 110.

[0749] Embodiment 47 is the pharmaceutical composition of embodiment 37, 39, or 44, wherein the first antigen-binding domain comprises a light chain variable domain that is at least 90% identical to SEQ ID NO: 2, wherein the light chain variable domain includes a histidine at one or more positions in SEQ ID NO: 2 selected from the group consisting of: 25, 26, 28, 30, 33, 34, 35, 36, 38, 39, 55, 56, and 95.

[0750] Embodiment 48 is the pharmaceutical composition of embodiment 37, 38, or 43, wherein the first antigen-binding domain comprises a heavy chain variable domain that is at least 90% identical to SEQ ID NO: 1, wherein the heavy chain variable domain includes a histidine at two or more positions in SEQ ID NO: 1 selected from the group consisting of: 31, 51, 56, 59, and 60.

[0751] Embodiment 49 the pharmaceutical composition of embodiment 37, 40, or 45, wherein the first antigen-binding domain comprises: a heavy chain variable domain that is at least 90% identical to SEQ ID NO: 1, wherein the heavy chain variable domain includes a histidine at one or more positions in SEQ ID NO: 1 selected from the group consisting of: 27, 28, 30, 31, 33, 34, 50, 51, 52, 53, 55, 56, 57, 59, 60, 63, 97, 98, 103, 104, 108, and 110; and a light chain variable domain that is at least 90% identical to SEQ ID NO: 2, wherein the light chain variable domain includes a histidine at one or more positions in SEQ ID NO: 2 selected from the group consisting of: 25, 26, 28, 30, 33, 34, 35, 36, 38, 39, 55, 56, and 95.

[0752] Embodiment 50 is the pharmaceutical composition of embodiment 37, wherein the first antigen-binding domain comprises a heavy chain variable domain of SEQ ID NO: 14, SEQ ID NO: 15, SEQ ID NO: 17, SEQ ID NO: 18, SEQ ID NO: 20, SEQ ID NO: 21, SEQ ID NO: 23, SEQ ID NO: 24, SEQ ID NO: 25, SEQ ID NO: 26, SEQ ID NO: 28, SEQ ID NO: 29, SEQ ID NO: 30, SEQ ID NO: 32, SEQ ID NO: 33, SEQ ID NO: 36, SEQ ID NO: 38, SEQ ID NO: 39, SEQ ID NO: 44, SEQ ID NO: 45, SEQ ID NO: 49, or SEQ ID NO: 51.

[0753] Embodiment 51 is the pharmaceutical composition of embodiment 37 or 50, wherein the first antigen-binding domain comprises a light chain variable domain of SEQ ID NO: 53, SEQ ID NO: 54, SEQ ID NO: 56, SEQ ID NO: 58, SEQ ID NO: 61, SEQ ID NO: 62, SEQ ID NO: 63, SEQ ID NO: 64, SEQ ID NO: 66, SEQ ID NO: 67, SEQ ID NO: 68, SEQ ID NO: 69, SEQ ID NO: 76, or SEQ ID NO: 79.

[0754] Embodiment 52 the pharmaceutical composition of embodiment 37, wherein the first antigen-binding domain comprises a heavy chain variable domain of SEQ ID NO: 84, SEQ ID NO: 85, SEQ ID NO: 86, SEQ ID NO: 87, SEQ ID NO: 88, SEQ ID NO: 89, SEQ ID NO: 90, SEQ ID NO: 91, SEQ ID NO: 92, SEQ ID NO: 93, SEQ ID NO: 94, SEQ ID NO: 95, SEQ ID NO: 96, SEQ ID NO: 97, SEQ ID NO: 98, SEQ ID NO: 99, SEQ ID NO: 100, SEQ ID NO: 101, SEQ ID NO: 102, or SEQ ID NO: 103.

[0755] Embodiment 53 is the pharmaceutical composition of embodiment 52, wherein the first antigen-binding domain comprises a light chain variable domain of SEQ ID NO: 2, SEQ ID NO: 53, SEQ ID NO: 54, SEQ ID NO: 56, SEQ ID NO: 58, SEQ ID NO: 61, SEQ ID NO: 62, SEQ ID NO: 63, SEQ ID NO: 64, SEQ ID NO: 66, SEQ ID NO: 67, SEQ ID NO: 68, SEQ ID NO: 69, SEQ ID NO: 76, or SEQ ID NO: 79.

[0756] Embodiment 54 is the pharmaceutical composition of any one of embodiments 37-53, wherein the composition provides for an increase in toxin liberation in the target mammalian cell as compared to a composition comprising the same amount of a control ABPC.

[0757] Embodiment 55 is the pharmaceutical composition of embodiment 54, wherein the composition provides for at least a 20% increase in toxin liberation in the target mammalian cell as compared to a composition comprising the same amount of a control ABPC.

[0758] Embodiment 56 is the pharmaceutical composition of embodiment 55, wherein the composition provides for at least a 50% increase in toxin liberation in the target mammalian cell as compared to a composition comprising the same amount of a control ABPC.

[0759] Embodiment 57 is the pharmaceutical composition of embodiment 54, wherein the composition provides for at least a 2-fold increase in toxin liberation in the target mammalian cell as compared to a composition comprising the same amount of a control ABPC.

[0760] Embodiment 58 is the pharmaceutical composition of embodiment 57, wherein the composition provides for at least a 5-fold increase in toxin liberation in the target mammalian cell as compared to a composition comprising the same amount of a control ABPC.

[0761] Embodiment 59 the pharmaceutical composition of any one of embodiments 37-58, wherein the composition provides for an increase in target mammalian cell killing as compared to a composition comprising the same amount of a control ABPC.

[0762] Embodiment 60 is the pharmaceutical composition of embodiment 59, wherein the composition provides for at least a 20% increase in target mammalian cell killing as compared to a composition comprising the same amount of a control ABPC.

[0763] Embodiment 61 is the pharmaceutical composition of embodiment 60, wherein the composition provides for at least a 50% increase in target mammalian cell killing as compared to a composition comprising the same amount of a control ABPC.

[0764] Embodiment 62 is the pharmaceutical composition of embodiment 59, wherein the composition provides for at least a 2-fold increase in target mammalian cell killing as compared to a composition comprising the same amount of a control ABPC.

[0765] Embodiment 63 is the pharmaceutical composition of embodiment 62, wherein the composition provides for at least a 5-fold increase in target mammalian cell killing as compared to a composition comprising the same amount of a control ABPC.

[0766] Embodiment 64 is the pharmaceutical composition of any one of embodiments 37-63, wherein the composition provides for an increase in endolysosomal delivery in the target mammalian cell as compared to a composition comprising the same amount of a control ABPC.

[0767] Embodiment 65 is the pharmaceutical composition of embodiment 64, wherein the composition provides for at least a 20% increase in endolysosomal delivery in the target mammalian cell as compared to a composition comprising the same amount of a control ABPC.

[0768] Embodiment 66 is the pharmaceutical composition of embodiment 65, wherein the composition provides for at least a 50% increase in endolysosomal delivery in the target mammalian cell as compared to a composition comprising the same amount of a control ABPC.

[0769] Embodiment 67 the pharmaceutical composition of embodiment 64, wherein the composition provides for at least a 2-fold increase in endolysosomal delivery in the target mammalian cell as compared to a composition comprising the same amount of a control ABPC.

[0770] Embodiment 68 is the pharmaceutical composition of embodiment 67, wherein the composition provides for at least a 5-fold increase in endolysosomal delivery in the target mammalian cell as compared to a composition comprising the same amount of a control ABPC.

[0771] Embodiment 69 the pharmaceutical composition of any one of embodiments 37-68, wherein the composition results in a less of a reduction in the level of CD22 presented on the surface of the target mammalian cell as compared to a composition comprising the same amount of a control ABPC.

[0772] Embodiment 70 is the pharmaceutical composition of any one of embodiments 37-68, wherein the composition does not result in a detectable reduction in the level of the CD22 presented on the surface of the target mammalian cell.

[0773] Embodiment 71 the pharmaceutical composition of any one of embodiments 1-70, wherein the target mammalian cell is a cancer cell.

[0774] Embodiment 72 is the pharmaceutical composition of any one of embodiments 1-71, wherein the dissociation rate of the antigen-binding domain at a pH of about 4.0 to about 6.5 is at least 10% faster than the dissociation rate of the antigen-binding domain at a pH of about 7.0 to about 8.0.

[0775] Embodiment 73 is the pharmaceutical composition of any one of embodiments 1-71, wherein the dissociation rate of the antigen-binding domain at a pH of about 4.0 to about 6.5 is at least 3-fold faster than the dissociation rate of the antigen-binding domain at a pH of about 7.0 to about 8.0.

[0776] Embodiment 74 is the pharmaceutical composition of any one of embodiments 1-71, wherein the dissociation rate of the antigen-binding domain at a pH of about 4.0 to about 6.5 is at least 10-fold faster than the dissociation rate of the antigen-binding domain at a pH of about 7.0 to about 8.0.

[0777] Embodiment 75 the pharmaceutical composition of any one of embodiments 1-74, wherein the KD of the antigen-binding domain at a pH of about 4.0 to about 6.5 is at least 10% greater than the KD of the antigen-binding domain at a pH of about 7.0 to about 8.0.

[0778] Embodiment 76 is the pharmaceutical composition of any one of embodiments 1-74, wherein the KD of the antigen-binding domain at a pH of about 4.0 to about 6.5 is at least 3-fold greater than the KD of the antigen-binding domain at a pH of about 7.0 to about 8.0.

[0779] Embodiment 77 is the pharmaceutical composition of any one of embodiments 1-74, wherein the KD of the antigen-binding domain at a pH of about 4.0 to about 6.5 is at least 10-fold greater than the KD of the antigen-binding domain at a pH of about 7.0 to about 8.0.

[0780] Embodiment 78 is the pharmaceutical composition of any one of embodiments 1-77, wherein the ABPC is cytotoxic or cytostatic to the target mammalian cell.

[0781] Embodiment 79 is the pharmaceutical composition of any one of embodiments 1-78, wherein the ABPC is cross-reactive with a non-human primate CD22 and human CD22.

[0782] Embodiment 80 is the pharmaceutical composition of any one of embodiments 1-78, wherein the ABPC is cross-reactive with a non-human primate CD22, a human CD22, and one or both of rat CD22 and a mouse CD22.

[0783] Embodiment 81 is the pharmaceutical composition of embodiment 80, wherein the ABPC is cross-reactive with a non-human primate CD22, a human CD22, a rat CD22, and a mouse CD22.

[0784] Embodiment 82 is the pharmaceutical composition of any one of embodiments 1-81, wherein the antigen-binding domain binds to an epitope of CD22 that is present on the surface of cells from an Old World Monkey.

[0785] Embodiment 83 is the pharmaceutical composition of any one of embodiments 1-82, wherein the ABPC comprises a single polypeptide.

[0786] Embodiment 84 is the pharmaceutical composition of embodiment 83, wherein the antigen-binding domain is selected from the group consisting of: a VH domain, a VHH domain, a VNAR domain, and a scFv.

[0787] Embodiment 85 is the pharmaceutical composition of embodiment 83 or 84, wherein the ABPC is a BiTe, a (scFv)2, a nanobody, a nanobody-HSA, a DART, a TandAb, a scDiabody, a scDiabody-CH3, scFv-CH-CL-scFv, a HSAbody, scDiabody-HSA, or a tandem-scFv.

[0788] Embodiment 86 is the pharmaceutical composition of any one of embodiments 1-82, wherein the ABPC comprises two or more polypeptides.

[0789] Embodiment 87 is the pharmaceutical composition of embodiment 86, wherein the ABPC is selected from the group of an antibody, a VHH-scAb, a VHH-Fab, a Dual scFab, a F(ab′)2, a diabody, a crossMab, a DAF (two-in-one), a DAF (four-in-one), a DutaMab, a DT-IgG, a knobs-in-holes common light chain, a knobs-in-holes assembly, a charge pair, a Fab-arm exchange, a SEEDbody, a LUZ-Y, a Fcab, a κλ-body, an orthogonal Fab, a DVD-IgG, a IgG(H)-scFv, a scFv-(H)IgG, IgG(L)-scFv, scFv-(L)IgG, IgG(L,H)-Fv, IgG(H)-V, V(H)-IgG, IgG(L)-V, V(L)-IgG, KIH IgG-scFab, 2scFv-IgG, IgG-2scFv, scFv4-Ig, Zybody, DVI-IgG, Diabody-CH3, a triple body, a miniantibody, a minibody, a TriBi minibody, scFv-CH3 KIH, Fab-scFv, a F(ab′)2-scFv2, a scFv-KIH, a Fab-scFv-Fc, a tetravalent HCAb, a scDiabody-Fc, a Diabody-Fc, a tandem scFv-Fc, a VHH-Fc, a tandem VHH-Fc, a VHH-Fc KiH, a Fab-VHH-Fc, an Intrabody, a dock and lock, an ImmTAC, an IgG-IgG conjugate, a Cov-X-Body, a scFv1-PEG-scFv2, an Adnectin, a DARPin, a fibronectin, and a DEP conjugate.

[0790] Embodiment 88 is the pharmaceutical composition of any one of embodiments 19-87, wherein at least one polypeptide of the ABPC is conjugated to the toxin, the radioisotope, the drug, or the small molecule via a cleavable linker.

[0791] Embodiment 89 is the pharmaceutical composition of any one of embodiments 19-87, wherein at least one polypeptide of the ABPC is conjugated to the toxin, the radioisotope, the drug, or the small molecule via a non-cleavable linker.

[0792] Embodiment 90 is the pharmaceutical composition of any of embodiments 1-89, wherein the half-life of the ABPC in vivo is decreased as compared to the half-life of a control ABPC in vivo.

[0793] Embodiment 91 is the pharmaceutical composition of embodiment 90, wherein the half-life of the ABPC in vivo is decreased about 5% to about 95% as compared to the half-life of a control ABPC in vivo.

[0794] Embodiment 92 is the pharmaceutical composition of embodiment 90, wherein the half-life of the ABPC in vivo is decreased about 10% to about 95% as compared to the half-life of a control ABPC in vivo.

[0795] Embodiment 93 is the pharmaceutical composition of embodiment 90, wherein the half-life of the ABPC in vivo is decreased about 30% to about 95% as compared to the half-life of a control ABPC in vivo.

[0796] Embodiment 94 is the pharmaceutical composition of embodiment 90, wherein the half-life of the ABPC in vivo is decreased about 50% to about 95% as compared to the half-life of a control ABPC in vivo.

[0797] Embodiment 95 is the pharmaceutical composition of embodiment 90, wherein the half-life of the ABPC in vivo is decreased about 70% to about 95% as compared to the half-life of a control ABPC in vivo.

[0798] Embodiment 96 is the pharmaceutical composition of any one of embodiments 20-95, wherein the control ABPC is capable of specifically binding to CD22 or an epitope of CD22 presented on the surface of a target mammalian cell, wherein: (a) the control ABPC comprises a first antigen-binding domain: (b) the dissociation rate of the first antigen-binding domain of the control ABPC at a pH of about 4.0 to about 6.5 is no more than 3-fold faster than the dissociation rate at a pH of about 7.0 to about 8.0; and (c) the dissociation constant (KD) of the first antigen-binding domain of the control ABPC at a pH of about 4.0 to about 6.5 is no more than 3-fold greater than the KD at a pH of about 7.0 to about 8.0.

[0799] Embodiment 97 is the pharmaceutical composition of any one of embodiments 20-95, wherein the control ABPC is capable of specifically binding to CD22 or an epitope of CD22 presented on the surface of a target mammalian cell, wherein: (a) the control ABPC comprises a first antigen-binding domain; (b) the dissociation rate of the first antigen-binding domain of the control ABPC at a pH of about 4.0 to about 6.5 is no more than 2-fold faster than the dissociation rate at a pH of about 7.0 to about 8.0; and (c) the dissociation constant (KD) of the first antigen-binding domain of the control ABPC at a pH of about 4.0 to about 6.5 is no more than 2-fold greater than the KD at a pH of about 7.0 to about 8.0.

[0800] Embodiment 98 is the pharmaceutical composition of any one of embodiments 20-95, wherein the control ABPC is capable of specifically binding to CD22 or an epitope of CD22 presented on the surface of a target mammalian cell, wherein: (a) the control ABPC comprises a first antigen-binding domain; (b) the dissociation rate of the first antigen-binding domain of the control ABPC at a pH of about 4.0 to about 6.5 is no more than 1-fold faster than the dissociation rate at a pH of about 7.0 to about 8.0; and (c) the dissociation constant (KD) of the first antigen-binding domain of the control ABPC at a pH of about 4.0 to about 6.5 is no more than 1-fold greater than the KD at a pH of about 7.0 to about 8.0.

[0801] Embodiment 99 is the pharmaceutical composition of any one of embodiments 20-95, wherein the control ABPC is inotuzumab

[0802] Embodiment 100 is the pharmaceutical composition of any one of embodiments 1-99, wherein the ABPC further comprises a second antigen-binding domain.

[0803] Embodiment 101 is a kit comprising at least one dose of the pharmaceutical composition of any one of embodiments 1-100.

[0804] Embodiment 102 is an antigen-binding protein construct (ABPC) comprising: a first antigen-binding domain that is capable of specifically binding CD22 or an epitope of CD22 presented on the surface of a target mammalian cell, wherein: (a) the dissociation rate of the first antigen-binding domain at a pH of about 4.0 to about 6.5 is faster than the dissociation rate at a pH of about 7.0 to about 8.0; or (b) the dissociation constant (KD) of the first antigen-binding domain at a pH of about 4.0 to about 6.5 is greater than the KD at a pH of about 7.0 to about 8.0.

[0805] Embodiment 103 is the ABPC of embodiment 102, wherein the first antigen-binding domain comprises a heavy chain variable domain of inotuzumab with one or more amino acids substituted with a histidine.

[0806] Embodiment 104 is the ABPC of embodiment 102, wherein the first antigen-binding domain comprises a light chain variable domain of inotuzumab with one or more amino acids substituted with a histidine.

[0807] Embodiment 105 is the ABPC of embodiment 102, wherein the first antigen-binding domain comprises: a heavy chain variable domain of inotuzumab with one or more amino acids substituted with a histidine; and a light chain variable domain of inotuzumab with one or more amino acids substituted with a histidine.

[0808] Embodiment 106 is the ABPC of embodiment 103 or 105, wherein the heavy chain variable domain of inotuzumab comprises SEQ ID NO: 1.

[0809] Embodiment 107 is the ABPC of embodiment 104 or 105, wherein the light chain variable domain of inotuzumab comprises SEQ ID NO: 2.

[0810] Embodiment 108 is the ABPC of embodiment 102, wherein the first antigen-binding domain comprises a heavy chain variable domain comprising a CDR1, a CDR2, and a CDR3 of SEQ ID NOs: 3-5, respectively, with collectively a total of one or more amino acid positions in SEQ ID NOs: 3-5 substituted with a histidine.

[0811] Embodiment 109 is the ABPC of embodiment 102, wherein the first CD22-binding domain comprises a light chain variable domain comprising a CDR1, a CDR2, and a CDR3 of SEQ ID NOs: 6-8, respectively, with collectively a total of one or more amino acid positions in SEQ ID NOs: 6-8 substituted with a histidine.

[0812] Embodiment 110 is the ABPC of embodiment 102, wherein the first CD22-binding domain comprises: a heavy chain variable domain comprising a CDR1, a CDR2, and a CDR3 of SEQ ID NOs: 3-5, respectively, with collectively a total of one or more amino acid positions in SEQ ID NOs: 3-5 substituted with a histidine; and a light chain variable domain comprising a CDR1, a CDR2, and a CDR3 of SEQ ID NOs: 6-8, respectively, with collectively a total of one or more amino acid positions in SEQ ID NOs: 6-8 substituted with a histidine.

[0813] Embodiment 111 is the ABPC of embodiment 102, 103, or 108, wherein the first antigen-binding domain comprises a heavy chain variable domain that is at least 90% identical to SEQ ID NO: 1, wherein the heavy chain variable domain includes a histidine at one or more positions in SEQ ID NO: 1 selected from the group consisting of: 27, 28, 30, 31, 33, 34, 50, 51, 52, 53, 55, 56, 57, 59, 60, 63, 97, 98, 103, 104, 108, and 110.

[0814] Embodiment 112 is the ABPC of embodiment 102, 104, or 109, wherein the first antigen-binding domain comprises a light chain variable domain that is at least 90% identical to SEQ ID NO: 2, wherein the light chain variable domain includes a histidine at one or more positions in SEQ ID NO: 2 selected from the group consisting of: 25, 26, 28, 30, 33, 34, 35, 36, 38, 39, 55, 56, and 95.

[0815] Embodiment 113 is the ABPC of embodiment 102, 103, or 108, wherein the first antigen-binding domain comprises a heavy chain variable domain that is at least 90% identical to SEQ ID NO: 1, wherein the heavy chain variable domain includes a histidine at two or more positions in SEQ ID NO: 1 selected from the group consisting of: 31, 51, 56, 59, and 60.

[0816] Embodiment 114 is the ABPC of embodiment 102, 105, or 110, wherein the first antigen-binding domain comprises: a heavy chain variable domain that is at least 90% identical to SEQ ID NO: 1, wherein the heavy chain variable domain includes a histidine at one or more positions in SEQ ID NO: 1 selected from the group consisting of: 27, 28, 30, 31, 33, 34, 50, 51, 52, 53, 55, 56, 57, 59, 60, 63, 97, 98, 103, 104, 108, and 110; and a light chain variable domain that is at least 90% identical to SEQ ID NO: 2, wherein the light chain variable domain includes a histidine at one or more positions in SEQ ID NO: 2 selected from the group consisting of: 25, 26, 28, 30, 33, 34, 35, 36, 38, 39, 55, 56, and 95.

[0817] Embodiment 115 is the ABPC of embodiment 102, wherein the first antigen-binding domain comprises a heavy chain variable domain of SEQ ID NO: 14, SEQ ID NO: 15, SEQ ID NO: 17, SEQ ID NO: 18, SEQ ID NO: 20, SEQ ID NO: 21, SEQ ID NO: 23, SEQ ID NO: 24, SEQ ID NO: 25, SEQ ID NO: 26, SEQ ID NO: 28, SEQ ID NO: 29, SEQ ID NO: 30, SEQ ID NO: 32, SEQ ID NO: 33, SEQ ID NO: 36, SEQ ID NO: 38, SEQ ID NO: 39, SEQ ID NO: 44, SEQ ID NO: 45, SEQ ID NO: 49, or SEQ ID NO: 51.

[0818] Embodiment 116 is the ABPC of embodiment 102 or 115, wherein the first antigen-binding domain comprises a light chain variable domain of SEQ ID NO: 2, SEQ ID NO: 53, SEQ ID NO: 54, SEQ ID NO: 56, SEQ ID NO: 58, SEQ ID NO: 61, SEQ ID NO: 62, SEQ ID NO: 63, SEQ ID NO: 64, SEQ ID NO: 66, SEQ ID NO: 67, SEQ ID NO: 68, SEQ ID NO: 69, SEQ ID NO: 76, or SEQ ID NO: 79.

[0819] Embodiment 117 is the ABPC of embodiment 102, wherein the first antigen-binding domain comprises a heavy chain variable domain of SEQ ID NO: 84, SEQ ID NO: 85, SEQ ID NO: 86, SEQ ID NO: 87, SEQ ID NO: 88, SEQ ID NO: 89, SEQ ID NO: 90, SEQ ID NO: 91, SEQ ID NO: 92, SEQ ID NO: 93, SEQ ID NO: 94, SEQ ID NO: 95, SEQ ID NO: 96, SEQ ID NO: 97, SEQ ID NO: 98, SEQ ID NO: 99, SEQ ID NO: 100, SEQ ID NO: 101, SEQ ID NO: 102, or SEQ ID NO: 103.

[0820] Embodiment 118 is the ABPC of embodiment 117, wherein the first antigen-binding domain comprises a light chain variable domain of SEQ ID NO:2, SEQ ID NO: 53, SEQ ID NO: 54, SEQ ID NO: 56, SEQ ID NO: 58, SEQ ID NO: 61, SEQ ID NO: 62, SEQ ID NO: 63, SEQ ID NO: 64, SEQ ID NO: 66, SEQ ID NO: 67, SEQ ID NO: 68, SEQ ID NO: 69, SEQ ID NO: 76, or SEQ ID NO: 79.

[0821] Embodiment 119 is the ABPC of any one of embodiments 102-118, wherein the ABPC is degraded in the target mammalian cell following internalization of the ABPC by the target mammalian cell.

[0822] Embodiment 120 is the ABPC of any one of embodiments 102-119, wherein the ABPC further comprises a conjugated toxin, radioisotope, drug, or small molecule.

[0823] Embodiment 121 is the ABPC of embodiment 120, wherein a composition comprising the ABPC provides for an increase in toxin liberation in the target mammalian cell as compared to a composition comprising the same amount of a control ABPC.

[0824] Embodiment 122 is the ABPC of embodiment 121, wherein a composition comprising the ABPC provides for at least a 20% increase in toxin liberation in the target mammalian cell as compared to a composition comprising the same amount of a control ABPC.

[0825] Embodiment 123 is the ABPC of embodiment 122, wherein a composition comprising the ABPC provides for at least a 50% increase in toxin liberation in the target mammalian cell as compared to a composition comprising the same amount of a control ABPC.

[0826] Embodiment 124 is the ABPC of embodiment 121, wherein a composition comprising the ABPC provides for at least a 2-fold increase in toxin liberation in the target mammalian cell as compared to a composition comprising the same amount of a control ABPC.

[0827] Embodiment 125 is the ABPC of embodiment 124, wherein a composition comprising the ABPC provides for at least a 5-fold increase in toxin liberation in the target mammalian cell as compared to a composition comprising the same amount of a control ABPC.

[0828] Embodiment 126 is the ABPC of any one of embodiments 120-125, wherein a composition comprising the ABPC provides for an increase in target mammalian cell killing as compared to a composition comprising the same amount of a control ABPC.

[0829] Embodiment 127 is the ABPC of embodiment 126, wherein a composition comprising the ABPC provides for at least a 20% increase in target mammalian cell killing as compared to a composition comprising the same amount of a control ABPC.

[0830] Embodiment 128 is the ABPC of embodiment 127, wherein a composition comprising the ABPC provides for at least a 50% increase in target mammalian cell killing as compared to a composition comprising the same amount of a control ABPC.

[0831] Embodiment 129 is the ABPC of embodiment 126, wherein a composition comprising the ABPC provides for at least a 2-fold increase in target mammalian cell killing as compared to a composition comprising the same amount of a control ABPC.

[0832] Embodiment 130 is the ABPC of embodiment 129, wherein a composition comprising the ABPC provides for at least a 5-fold increase in target mammalian cell killing as compared to a composition comprising the same amount of a control ABPC.

[0833] Embodiment 131 is the ABPC of any one of embodiments 102-130, wherein a composition comprising the ABPC provides for an increase in endolysosomal delivery in the target mammalian cell as compared to a composition comprising the same amount of a control ABPC.

[0834] Embodiment 132 is the ABPC of embodiment 131, wherein a composition comprising the ABPC provides for at least a 20% increase in endolysosomal delivery in the target mammalian cell as compared to a composition comprising the same amount of a control ABPC.

[0835] Embodiment 133 is the ABPC of embodiment 132, wherein a composition comprising the ABPC provides for at least a 50% increase in endolysosomal delivery in the target mammalian cell as compared to a composition comprising the same amount of a control ABPC.

[0836] Embodiment 134 is the ABPC of embodiment 131, wherein a composition comprising the ABPC provides for at least a 2-fold increase in endolysosomal delivery in the target mammalian cell as compared to a composition comprising the same amount of a control ABPC.

[0837] Embodiment 135 is the ABPC of embodiment 134, wherein a composition comprising the ABPC provides for at least a 5-fold increase in endolysosomal delivery in the target mammalian cell as compared to a composition comprising the same amount of a control ABPC.

[0838] Embodiment 136 is the ABPC of any one of embodiments 102-135, wherein a composition comprising the ABPC results in a less of a reduction in the level of CD22 presented on the surface of the target mammalian cell as compared to a composition comprising the same amount of a control ABPC.

[0839] Embodiment 137 is the ABPC of any one of embodiments 102-135, wherein a composition comprising the ABPC does not result in a detectable reduction in the level of the CD22 presented on the surface of the target mammalian cell.

[0840] Embodiment 138 is an antigen-binding protein construct (ABPC) comprising: a first antigen-binding domain that is capable of specifically binding CD22 or an epitope of CD22 presented on the surface of a target mammalian cell; and a conjugated toxin, radioisotope, drug, or small molecule, wherein: (a) the dissociation rate of the first antigen-binding domain at a pH of about 4.0 to about 6.5 is faster than the dissociation rate at a pH of about 7.0 to about 8.0; or the dissociation constant (KD) of the first antigen-binding domain at a pH of about 4.0 to about 6.5 is greater than the KD at a pH of about 7.0 to about 8.0; and (b) the composition provides for one or more of: an increase in toxin liberation in the target mammalian cell as compared to a composition comprising the same amount of a control ABPC; an increase in target mammalian cell killing as compared to a composition comprising the same amount of a control ABPC; and an increase in endolysosomal delivery in the target mammalian cell as compared to a composition comprising the same amount of a control ABPC.

[0841] Embodiment 139 is the ABPC of embodiment 138, wherein the first antigen-binding domain comprises a heavy chain variable domain of inotuzumab with one or more amino acids substituted with a histidine.

[0842] Embodiment 140 is the ABPC of embodiment 138, wherein the first antigen-binding domain comprises a light chain variable domain of inotuzumab with one or more amino acids substituted with a histidine.

[0843] Embodiment 141 is the ABPC of embodiment 138, wherein the first antigen-binding domain comprises: a heavy chain variable domain of inotuzumab with one or more amino acids substituted with a histidine; and a light chain variable domain of inotuzumab with one or more amino acids substituted with a histidine.

[0844] Embodiment 142 is the ABPC of embodiment 139 or 141, wherein the heavy chain variable domain of inotuzumab comprises SEQ ID NO: 1.

[0845] Embodiment 143 is the ABPC of embodiment 140 or 141, wherein the light chain variable domain of inotuzumab comprises SEQ ID NO: 2.

[0846] Embodiment 144 is the ABPC of embodiment 138, wherein the first antigen-binding domain comprises a heavy chain variable domain comprising a CDR1, a CDR2, and a CDR3 of SEQ ID NOs: 3-5, respectively, with collectively a total of one or more amino acid positions in SEQ ID NOs: 3-5 substituted with a histidine.

[0847] Embodiment 145 is the ABPC of embodiment 138, wherein the first CD22-binding domain comprises a light chain variable domain comprising a CDR1, a CDR2, and a CDR3 of SEQ ID NOs: 6-8, respectively, with collectively a total of one or more amino acid positions in SEQ ID NOs: 6-8 substituted with a histidine.

[0848] Embodiment 146 is the ABPC of embodiment 138, wherein the first CD22-binding domain comprises: a heavy chain variable domain comprising a CDR1, a CDR2, and a CDR3 of SEQ ID NOs: 3-5, respectively, with collectively a total of one or more amino acid positions in SEQ ID NOs: 3-5 substituted with a histidine; and a light chain variable domain comprising a CDR1, a CDR2, and a CDR3 of SEQ ID NOs: 6-8, respectively, with collectively a total of one or more amino acid positions in SEQ ID NOs: 6-8 substituted with a histidine.

[0849] Embodiment 147 is the ABPC of embodiment 138, 139, or 144, wherein the first antigen-binding domain comprises a heavy chain variable domain that is at least 90% identical to SEQ ID NO: 1, wherein the heavy chain variable domain includes a histidine at one or more positions in SEQ ID NO: 1 selected from the group consisting of: 27, 28, 30, 31, 33, 34, 50, 51, 52, 53, 55, 56, 57, 59, 60, 63, 97, 98, 103, 104, 108, and 110.

[0850] Embodiment 148 is the ABPC of embodiment 138, 140, or 145, wherein the first antigen-binding domain comprises a light chain variable domain that is at least 90% identical to SEQ ID NO: 2, wherein the light chain variable domain includes a histidine at one or more positions in SEQ ID NO: 2 selected from the group consisting of: 25, 26, 28, 30, 33, 34, 35, 36, 38, 39, 55, 56, and 95.

[0851] Embodiment 149 is the ABPC of embodiment 138, 139, or 144, wherein the first antigen-binding domain comprises a heavy chain variable domain that is at least 90% identical to SEQ ID NO: 1, wherein the heavy chain variable domain includes a histidine at two more positions in SEQ ID NO: 1 selected from the group consisting of: 31, 51, 56, 59, and 60.

[0852] Embodiment 150 is the ABPC of embodiment 138, 141, or 146, wherein the first antigen-binding domain comprises: a heavy chain variable domain that is at least 90% identical to SEQ ID NO: 1, wherein the heavy chain variable domain includes a histidine at one or more positions in SEQ ID NO: 1 selected from the group consisting of: 27, 28, 30, 31, 33, 34, 50, 51, 52, 53, 55, 56, 57, 59, 60, 63, 97, 98, 103, 104, 108, and 110; and a light chain variable domain that is at least 90% identical to SEQ ID NO: 2, wherein the light chain variable domain includes a histidine at one or more positions in SEQ ID NO: 2 selected from the group consisting of: 25, 26, 28, 30, 33, 34, 35, 36, 38, 39, 55, 56, and 95.

[0853] Embodiment 151 is the ABPC of embodiment 138, wherein the first antigen-binding domain comprises a heavy chain variable domain of SEQ ID NO: 14, SEQ ID NO: 15, SEQ ID NO: 17, SEQ ID NO: 18, SEQ ID NO: 20, SEQ ID NO: 21, SEQ ID NO: 23, SEQ ID NO: 24, SEQ ID NO: 25, SEQ ID NO: 26, SEQ ID NO: 28, SEQ ID NO: 29, SEQ ID NO: 30, SEQ ID NO: 32, SEQ ID NO: 33, SEQ ID NO: 36, SEQ ID NO: 38, SEQ ID NO: 39, SEQ ID NO: 44, SEQ ID NO: 45, SEQ ID NO: 49, or SEQ ID NO: 51.

[0854] Embodiment 152 is the ABPC of embodiment 138 or 151, wherein the first antigen-binding domain comprises a light chain variable domain of SEQ ID NO:2, SEQ ID NO: 53, SEQ ID NO: 54, SEQ ID NO: 56, SEQ ID NO: 58, SEQ ID NO: 61, SEQ ID NO: 62, SEQ ID NO: 63, SEQ ID NO: 64, SEQ ID NO: 66, SEQ ID NO: 67, SEQ ID NO: 68, SEQ ID NO: 69, SEQ ID NO: 76, or SEQ ID NO: 79.

[0855] Embodiment 153 is the ABPC of embodiment 138, wherein the first antigen-binding domain comprises a heavy chain variable domain of SEQ ID NO: 84, SEQ ID NO: 85, SEQ ID NO: 86, SEQ ID NO: 87, SEQ ID NO: 88, SEQ ID NO: 89, SEQ ID NO: 90, SEQ ID NO: 91, SEQ ID NO: 92, SEQ ID NO: 93, SEQ ID NO: 94, SEQ ID NO: 95, SEQ ID NO: 96, SEQ ID NO: 97, SEQ ID NO: 98, SEQ ID NO: 99, SEQ ID NO: 100, SEQ ID NO: 101, SEQ ID NO: 102, or SEQ ID NO: 103.

[0856] Embodiment 154 is the ABPC of embodiment 153, wherein the first antigen-binding domain comprises a light chain variable domain of SEQ ID NO: 2, SEQ ID NO: 53, SEQ ID NO: 54, SEQ ID NO: 56, SEQ ID NO: 58, SEQ ID NO: 61, SEQ ID NO: 62, SEQ ID NO: 63, SEQ ID NO: 64, SEQ ID NO: 66, SEQ ID NO: 67, SEQ ID NO: 68, SEQ ID NO: 69, SEQ ID NO: 76, or SEQ ID NO: 79.

[0857] Embodiment 155 is the ABPC of any one of embodiments 138-154, wherein a composition comprising the ABPC provides for an increase in toxin liberation in the target mammalian cell as compared to a composition comprising the same amount of a control ABPC.

[0858] Embodiment 156 is the ABPC of embodiment 155, wherein a composition comprising the ABPC provides for at least a 20% increase in toxin liberation in the target mammalian cell as compared to a composition comprising the same amount of a control ABPC.

[0859] Embodiment 157 is the ABPC of embodiment 156, wherein a composition comprising the ABPC provides for at least a 50% increase in toxin liberation in the target mammalian cell as compared to a composition comprising the same amount of a control ABPC.

[0860] Embodiment 158 is the ABPC of embodiment 155, wherein a composition comprising the ABPC provides for at least a 2-fold increase in toxin liberation in the target mammalian cell as compared to a composition comprising the same amount of a control ABPC.

[0861] Embodiment 159 is the ABPC of embodiment 158, wherein a composition comprising the ABPC provides for at least a 5-fold increase in toxin liberation in the target mammalian cell as compared to a composition comprising the same amount of a control ABPC.

[0862] Embodiment 160 is the ABPC of any one of embodiments 138-159, wherein a composition comprising the ABPC provides for an increase in target mammalian cell killing as compared to a composition comprising the same amount of a control ABPC.

[0863] Embodiment 161 is the ABPC of embodiment 160, wherein a composition comprising the ABPC provides for at least a 20% increase in target mammalian cell killing as compared to a composition comprising the same amount of a control ABPC.

[0864] Embodiment 162 is the ABPC of embodiment 161, wherein a composition comprising the ABPC provides for at least a 50% increase in target mammalian cell killing as compared to a composition comprising the same amount of a control ABPC.

[0865] Embodiment 163 is the ABPC of embodiment 160, wherein a composition comprising the ABPC provides for at least a 2-fold increase in target mammalian cell killing as compared to a composition comprising the same amount of a control ABPC.

[0866] Embodiment 164 the ABPC of embodiment 163, wherein a composition comprising the ABPC provides for at least a 5-fold increase in target mammalian cell killing as compared to a composition comprising the same amount of a control ABPC.

[0867] Embodiment 165 is the ABPC of any one of embodiments 138-164, wherein a composition comprising the ABPC provides for an increase in endolysosomal delivery in the target mammalian cell as compared to a composition comprising the same amount of a control ABPC.

[0868] Embodiment 166 the ABPC of embodiment 165, wherein a composition comprising the ABPC provides for at least a 20% increase in endolysosomal delivery in the target mammalian cell as compared to a composition comprising the same amount of a control ABPC.

[0869] Embodiment 167 is the ABPC of embodiment 166, wherein a composition comprising the ABPC provides for at least a 50% increase in endolysosomal delivery in the target mammalian cell as compared to a composition comprising the same amount of a control ABPC.

[0870] Embodiment 168 is the ABPC of embodiment 165, wherein a composition comprising the ABPC provides for at least a 2-fold increase in endolysosomal delivery in the target mammalian cell as compared to a composition comprising the same amount of a control ABPC.

[0871] Embodiment 169 the ABPC of embodiment 168, wherein a composition comprising the ABPC provides for at least a 5-fold increase in endolysosomal delivery in the target mammalian cell as compared to a composition comprising the same amount of a control ABPC.

[0872] Embodiment 170 the ABPC of any one of embodiments 138-169, wherein a composition comprising the ABPC results in a less of a reduction in the level of CD22 presented on the surface of the target mammalian cell as compared to a composition comprising the same amount of a control ABPC.

[0873] Embodiment 171 is the ABPC of any one of embodiments 138-169, wherein a composition comprising the ABPC does not result in a detectable reduction in the level of the CD22 presented on the surface of the target mammalian cell.

[0874] Embodiment 172 is the ABPC of any one of embodiments 102-171, wherein the target mammalian cell is a cancer cell.

[0875] Embodiment 173 is the ABPC of any one of embodiments 102-172, wherein the dissociation rate of the antigen-binding domain at a pH of about 4.0 to about 6.5 is at least 10% faster than the dissociation rate of the antigen-binding domain at a pH of about 7.0 to about 8.0.

[0876] Embodiment 174 is the ABPC of any one of embodiments 102-172, wherein the dissociation rate of the antigen-binding domain at a pH of about 4.0 to about 6.5 is at least 3-fold faster than the dissociation rate of the antigen-binding domain at a pH of about 7.0 to about 8.0.

[0877] Embodiment 175 is the ABPC of any one of embodiments 102-172, wherein the dissociation rate of the antigen-binding domain at a pH of about 4.0 to about 6.5 is at least 10-fold faster than the dissociation rate of the antigen-binding domain at a pH of about 7.0 to about 8.0.

[0878] Embodiment 176 is the ABPC of any one of embodiments 102-175, wherein the KD of the antigen-binding domain at a pH of about 4.0 to about 6.5 is at least 10% greater than the KD of the antigen-binding domain at a pH of about 7.0 to about 8.0.

[0879] Embodiment 177 is the ABPC of any one of embodiments 102-175, wherein the KD of the antigen-binding domain at a pH of about 4.0 to about 6.5 is at least 3-fold greater than the KD of the antigen-binding domain at a pH of about 7.0 to about 8.0.

[0880] Embodiment 178 is the ABPC of any one of embodiments 102-175, wherein the KD of the antigen-binding domain at a pH of about 4.0 to about 6.5 is at least 10-fold greater than the KD of the antigen-binding domain at a pH of about 7.0 to about 8.0.

[0881] Embodiment 179 is the ABPC of any one of embodiments 102-178, wherein the ABPC is cytotoxic or cytostatic to the target mammalian cell.

[0882] Embodiment 180 is the ABPC of any one of embodiments 102-179, wherein the ABPC is cross-reactive with a non-human primate CD22 and human CD22.

[0883] Embodiment 181 is the pharmaceutical composition of any one of embodiments 102-179, wherein the ABPC is cross-reactive with a non-human primate CD22, a human CD22, and one or both of rat CD22 and a mouse CD22.

[0884] Embodiment 182 is he pharmaceutical composition of embodiment 181, wherein the ABPC is cross-reactive with a non-human primate CD22, a human CD22, a rat CD22, and a mouse CD22.

[0885] Embodiment 183 is the ABPC of any one of embodiments 102-182, wherein the antigen-binding domain binds to an epitope of CD22 that is present on the surface of cells from an Old World Monkey.

[0886] Embodiment 184 is the ABPC of any one of embodiments 102-183, wherein the ABPC comprises a single polypeptide.

[0887] Embodiment 185 is the ABPC of embodiment 184, wherein the antigen-binding domain is selected from the group consisting of: a VH domain, a VHH domain, a VNAR domain, and a scFv.

[0888] Embodiment 186 is the ABPC of embodiment 184 or 185, wherein the ABPC is a BiTe, a (scFv)2, a nanobody, a nanobody-HSA, a DART, a TandAb, a scDiabody, a scDiabody-CH3, scFv-CH-CL-scFv, a HSAbody, scDiabody-HSA, or a tandem-scFv.

[0889] Embodiment 187 is the ABPC of any one of embodiments 102-183, wherein the ABPC comprises two or more polypeptides.

[0890] Embodiment 188 is the ABPC of embodiment 187, wherein the ABPC is selected from the group of an antibody, a VHH-scAb, a VHH-Fab, a Dual scFab, a F(ab′)2, a diabody, a crossMab, a DAF (two-in-one), a DAF (four-in-one), a DutaMab, a DT-IgG, a knobs-in-holes common light chain, a knobs-in-holes assembly, a charge pair, a Fab-arm exchange, a SEEDbody, a LUZ-Y, a Fcab, a κλ-body, an orthogonal Fab, a DVD-IgG, a IgG(H)-scFv, a scFv-(H)IgG, IgG(L)-scFv, scFv-(L)IgG, IgG(L,H)-Fv, IgG(H)-V, V(H)-IgG, IgG(L)-V, V(L)-IgG, KIH IgG-scFab, 2scFv-IgG, IgG-2scFv, scFv4-Ig, Zybody, DVI-IgG, Diabody-CH3, a triple body, a miniantibody, a minibody, a TriBi minibody, scFv-CH3 KIH, Fab-scFv, a F(ab′)2-scFv2, a scFv-KIH, a Fab-scFv-Fc, a tetravalent HCAb, a scDiabody-Fc, a Diabody-Fc, a tandem scFv-Fc, a VHH-Fc, a tandem VHH-Fc, a VHH-Fc KiH, a Fab-VHH-Fc, an Intrabody, a dock and lock, an ImmTAC, an IgG-IgG conjugate, a Cov-X-Body, a scFv1-PEG-scFv2, an Adnectin, a DARPin, a fibronectin, and a DEP conjugate.

[0891] Embodiment 189 is the ABPC of any one of embodiments 120-188, wherein at least one polypeptide of the ABPC is conjugated to the toxin, the radioisotope, the drug, or the small molecule via a cleavable linker.

[0892] Embodiment 190 is the ABPC of any one of embodiments 120-188, wherein at least one polypeptide of the ABPC is conjugated to the toxin, the radioisotope, the drug, or the small molecule via a non-cleavable linker.

[0893] Embodiment 191 is the ABPC of any of embodiments 102-190, wherein the half-life of the ABPC in vivo is decreased as compared to the half-life of a control ABPC in vivo.

[0894] Embodiment 192 is the ABPC of embodiment 191, wherein the half-life of the ABPC in vivo is decreased about 5% to about 95% as compared to the half-life of a control ABPC in vivo.

[0895] Embodiment 193 is the ABPC of embodiment 191, wherein the half-life of the ABPC in vivo is decreased about 10% to about 95% as compared to the half-life of a control ABPC in vivo.

[0896] Embodiment 194 is the ABPC of embodiment 191, wherein the half-life of the ABPC in vivo is decreased about 30% to about 95% as compared to the half-life of a control ABPC in vivo.

[0897] Embodiment 195 is the ABPC of embodiment 191, wherein the half-life of the ABPC in vivo is decreased about 50% to about 95% as compared to the half-life of a control ABPC in vivo.

[0898] Embodiment 196 is the ABPC of embodiment 191, wherein the half-life of the ABPC in vivo is decreased about 70% to about 95% as compared to the half-life of a control ABPC in vivo.

[0899] Embodiment 197 is the ABPC of any one of embodiments 121-196, wherein the control ABPC is capable of specifically binding to CD22 or an epitope of CD22 presented on the surface of a target mammalian cell, wherein: (a) the control ABPC comprises a first antigen-binding domain;
[0900] (b) the dissociation rate of the first antigen-binding domain of the control ABPC at a pH of about 4.0 to about 6.5 is no more than 3-fold faster than the dissociation rate at a pH of about 7.0 to about 8.0; and (c) the dissociation constant (KD) of the first antigen-binding domain of the control ABPC at a pH of about 4.0 to about 6.5 is no more than 3-fold greater than the KD at a pH of about 7.0 to about 8.0.

[0901] Embodiment 198 is the ABPC of any one of embodiments 121-196, wherein the control ABPC is capable of specifically binding to CD22 or an epitope of CD22 presented on the surface of a target mammalian cell, wherein: (a) the control ABPC comprises a first antigen-binding domain;
[0902] (b) the dissociation rate of the first antigen-binding domain of the control ABPC at a pH of about 4.0 to about 6.5 is no more than 2-fold faster than the dissociation rate at a pH of about 7.0 to about 8.0; and (c) the dissociation constant (KD) of the first antigen-binding domain of the ABPC at a pH of about 4.0 to about 6.5 is no more than 2-fold greater than the KD at a pH of about 7.0 to about 8.0.

[0903] Embodiment 199 is the ABPC of any one of embodiments 121-196, wherein the control ABPC is capable of specifically binding to CD22 or an epitope of CD22 presented on the surface of a target mammalian cell, wherein: (a) the control ABPC comprises a first antigen-binding domain;
[0904] (b) the dissociation rate of the first antigen-binding domain of the control ABPC at a pH of about 4.0 to about 6.5 is no more than 1-fold faster than the dissociation rate at a pH of about 7.0 to about 8.0; and (c) the dissociation constant (KD) of the first antigen-binding domain of the control ABPC at a pH of about 4.0 to about 6.5 is no more than 1-fold greater than the KD at a pH of about 7.0 to about 8.0.

[0905] Embodiment 200 is the ABPC of any one of embodiments 121-196, wherein the control ABPC is inotuzumab.

[0906] Embodiment 201 is the ABPC of any one of embodiments 102-200, wherein the ABPC further comprises a second antigen-binding domain.

[0907] Embodiment 202 is a kit comprising at least one dose of the ABPC of any one of embodiments 102-201.

[0908] Embodiment 203 is a method of treating a cancer characterized by having a population of cancer cells that have CD22 or an epitope of CD22 presented on their surface, the method comprising: administering a therapeutically effective amount of the pharmaceutical composition of any one of embodiments 1-100 or the ABPC of any one of embodiments 102-201 to a subject identified as having a cancer characterized by having the population of cancer cells.

[0909] Embodiment 204 is a method of reducing the volume of a tumor in a subject, wherein the tumor is characterized by having a population of cancer cells that have CD22 or an epitope of CD22 presented on their surface, the method comprising: administering a therapeutically effective amount of the pharmaceutical composition of any one of embodiments 1-100 or the ABPC of any one of embodiments 102-201 to a subject identified as having a cancer characterized by having the population of cancer cells.

[0910] Embodiment 205 is a method of inducing cell death in a cancer cell in a subject, wherein the cancer cell has CD22 or an epitope of CD22 presented on its surface, wherein the method comprises: administering a therapeutically effective amount of the pharmaceutical composition of any one of embodiments 1-98 or the ABPC of any one of embodiments 102-201 to a subject identified as having a cancer characterized by having a population of the cancer cells.

[0911] Embodiment 206 is the method of any one of embodiments 203-205, wherein the cancer is a primary tumor.

[0912] Embodiment 207 is the method of any one of embodiments 203-205, wherein the cancer is a metastasis.

[0913] Embodiment 208 is the method of any one of embodiments 203-207, wherein the cancer is a non-T-cell-infiltrating tumor.

[0914] Embodiment 209 is the method of any one of embodiments 203-207, wherein the cancer is a T-cell infiltrating tumor.

[0915] Embodiment 210 is a method of decreasing the risk of developing a metastasis or decreasing the risk of developing an additional metastasis in a subject having a cancer, wherein the cancer is characterized by having a population of cancer cells that have CD22 or an epitope of CD22 presented on their surface the method comprising: administering a therapeutically effective amount of the pharmaceutical composition of any one of embodiments 1-100 or the ABPC of any one of embodiments 102-201 to a subject identified as having a cancer characterized by having the population of cancer cells.

[0916] Embodiment 211 is the method of embodiment 210, wherein the cancer is a non-T-cell-infiltrating tumor.

[0917] Embodiment 212 is the method of embodiment 210, wherein the cancer is a T-cell infiltrating tumor.

[0918] Embodiment A1 is a pharmaceutical composition comprising an effective amount of an antigen-binding protein construct (ABPC) comprising: a first antigen-binding domain that is capable of specifically binding CD22 or an epitope of CD22 presented on the surface of a target mammalian cell, wherein: (a) the dissociation rate of the first antigen-binding domain at a pH of about 4.0 to about 6.5 is faster than the dissociation rate at a pH of about 7.0 to about 8.0; or (b) the dissociation constant (K_{D}) of the first antigen-binding domain at a pH of about 4.0 to about 6.5 is greater than the K_{D} at a pH of about 7.0 to about 8.0.

[0919] Embodiment A2 is the pharmaceutical composition of embodiment A1, wherein the first antigen-binding domain comprises a heavy chain variable domain of pinatuzumab with one or more amino acids substituted with a histidine.

[0920] Embodiment A3 is the pharmaceutical composition of embodiment A1, wherein the first antigen-binding domain comprises a light chain variable domain of pinatuzumab with one or more amino acids substituted with a histidine.

[0921] Embodiment A4 is the pharmaceutical composition of embodiment A1, wherein the first antigen-binding domain comprises: a heavy chain variable domain of pinatuzumab with one or more amino acids substituted with a histidine; and a light chain variable domain of pinatuzumab with one or more amino acids substituted with a histidine.

[0922] Embodiment A5 is the pharmaceutical composition of embodiment A2 or A4, wherein the heavy chain variable domain of pinatuzumab comprises SEQ ID NO: 143.

[0923] Embodiment A6 is the pharmaceutical composition of embodiment A3 or A4, wherein the light chain variable domain of pinatuzumab comprises SEQ ID NO: 144.

[0924] Embodiment A7 is the pharmaceutical composition of embodiment A1, wherein the first antigen-binding domain comprises a heavy chain variable domain comprising a CDR1, a CDR2, and a CDR3 of SEQ ID NOs: 145-147, respectively, with collectively a total of one or more amino acid positions in SEQ ID NOs: 145-147 substituted with a histidine.

[0925] Embodiment A8 is the pharmaceutical composition of embodiment A1, wherein the first CD22-binding domain comprises a light chain variable domain comprising a CDR1, a CDR2, and a CDR3 of SEQ ID NOs: 148-150, respectively, with collectively a total of one or more amino acid positions in SEQ ID NOs: 148-150 substituted with a histidine.

[0926] Embodiment A9 is the pharmaceutical composition of embodiment A1, wherein the first CD22-binding domain comprises: a heavy chain variable domain comprising a CDR1, a CDR2, and a CDR3 of SEQ ID NOs: 145-147, respectively, with collectively a total of one or more amino acid positions in SEQ ID NOs: 145-147 substituted with a histidine; and a light chain variable domain comprising a CDR1, a CDR2, and a CDR3 of SEQ ID NOs: 148-150, respectively, with collectively a total of one or more amino acid positions in SEQ ID NOs: 148-150 substituted with a histidine.

[0927] Embodiment A10 is the pharmaceutical composition of embodiment A1, A2, or A7, wherein the first antigen-binding domain comprises a heavy chain variable domain that is at least 90% identical to SEQ ID NO: 143, wherein the heavy chain variable domain includes a histidine at one or more positions in SEQ ID NO: 143 selected from the group consisting of: 27, 28, 29, 30, 31, 34, 35, 50, 51, 54, 57, 59, 64, 98, 101, 102, 106, and 107.

[0928] Embodiment All is the pharmaceutical composition of embodiment A1, A3, or A8, wherein the first antigen-binding domain comprises a light chain variable domain that is at least 90% identical to SEQ ID NO: 144.

[0929] Embodiment A12 is the pharmaceutical composition of embodiment A1, A2, or A7, wherein the first antigen-binding domain comprises a heavy chain variable domain that is at least 90% identical to SEQ ID NO: 143.

[0930] Embodiment A13 is the pharmaceutical composition of embodiment A1, A4, or A9, wherein the first antigen-binding domain comprises: a heavy chain variable domain that is at least 90% identical to SEQ ID NO: 143, wherein the heavy chain variable domain includes a histidine at one or more positions in SEQ ID NO: 143 selected from the group consisting of: 27, 28, 29, 30, 31, 34, 35, 50, 51, 54, 57, 59, 64, 98, 101, 102, 106, and 107; and a light chain variable domain that is at least 90% identical to SEQ ID NO: 144.

[0931] Embodiment A14 is the pharmaceutical composition of embodiment A1, wherein the first antigen-binding domain comprises a heavy chain variable domain of SEQ ID NO: 152, SEQ ID NO: 153, SEQ ID NO: 154, SEQ ID NO: 155, SEQ ID NO: 156, SEQ ID NO: 159, SEQ ID NO: 160, SEQ ID NO: 161, SEQ ID NO: 162, SEQ ID NO: 165, SEQ ID NO: 168, SEQ ID NO: 170, SEQ ID NO: 175, SEQ ID NO: 179, SEQ ID NO: 182, SEQ ID NO: 183, SEQ ID NO: 187, OR SEQ ID NO: 188.

[0932] Embodiment A15 is the pharmaceutical composition of embodiment A1 or A14, wherein the first antigen-binding domain comprises a light chain variable domain of SEQ ID NO: 144.

[0933] Embodiment A16 is the pharmaceutical composition of embodiment A1, wherein the first antigen-binding domain comprises a heavy chain variable domain.

[0934] Embodiment A17 is the pharmaceutical composition of embodiment A16, wherein the first antigen-binding domain comprises a light chain variable domain of SEQ ID NO: 144.

[0935] Embodiment A18 is the pharmaceutical composition of any one of embodiments A1-A17, wherein the ABPC is degraded in the target mammalian cell following internalization of the ABPC by the target mammalian cell.

[0936] Embodiment A19 is the pharmaceutical composition of any one of embodiments A1-A18, wherein the ABPC further comprises a conjugated toxin, radioisotope, drug, or small molecule.

[0937] Embodiment A20 is the pharmaceutical composition of embodiment A19, wherein the composition provides for an increase in toxin liberation in the target mammalian cell as compared to a composition comprising the same amount of a control ABPC.

[0938] Embodiment A21 is the pharmaceutical composition of embodiment A20, wherein the composition provides for at least a 20% increase in toxin liberation in the target mammalian cell as compared to a composition comprising the same amount of a control ABPC.

[0939] Embodiment A22 is the pharmaceutical composition of embodiment A21, wherein the composition provides for at least a 50% increase in toxin liberation in the target mammalian cell as compared to a composition comprising the same amount of a control ABPC.

[0940] Embodiment A23 is the pharmaceutical composition of embodiment A20, wherein the composition provides for at least a 2-fold increase in toxin liberation in the target mammalian cell as compared to a composition comprising the same amount of a control ABPC.

[0941] Embodiment A24 is the pharmaceutical composition of embodiment A23, wherein the composition provides for at least a 5-fold increase in toxin liberation in the target mammalian cell as compared to a composition comprising the same amount of a control ABPC.

[0942] Embodiment A25 is the pharmaceutical composition of any one of embodiments A19-A24, wherein the composition provides for an increase in target mammalian cell killing as compared to a composition comprising the same amount of a control ABPC.

[0943] Embodiment A26 is the pharmaceutical composition of embodiment A25, wherein the composition provides for at least a 20% increase in target mammalian cell killing as compared to a composition comprising the same amount of a control ABPC.

[0944] Embodiment A27 is the pharmaceutical composition of embodiment A26, wherein the composition provides for at least a 50% increase in target mammalian cell killing as compared to a composition comprising the same amount of a control ABPC.

[0945] Embodiment A28 is the pharmaceutical composition of embodiment A25, wherein the composition provides for at least a 2-fold increase in target mammalian cell killing as compared to a composition comprising the same amount of a control ABPC.

[0946] Embodiment A29 is the pharmaceutical composition of embodiment A28, wherein the composition provides for at least a 5-fold increase in target mammalian cell killing as compared to a composition comprising the same amount of a control ABPC.

[0947] Embodiment A30 is the pharmaceutical composition of any one of embodiments A1-A29, wherein the composition provides for an increase in endolysosomal delivery in the target mammalian cell as compared to a composition comprising the same amount of a control ABPC.

[0948] Embodiment A31 is the pharmaceutical composition of embodiment A30, wherein the composition provides for at least a 20% increase in endolysosomal delivery in the target mammalian cell as compared to a composition comprising the same amount of a control ABPC.

[0949] Embodiment A32 is the pharmaceutical composition of embodiment A31, wherein the composition provides for at least a 50% increase in endolysosomal delivery in the target mammalian cell as compared to a composition comprising the same amount of a control ABPC.

[0950] Embodiment A33 is the pharmaceutical composition of embodiment A30, wherein the composition provides for at least a 2-fold increase in endolysosomal delivery in the target mammalian cell as compared to a composition comprising the same amount of a control ABPC.

[0951] Embodiment A34 is the pharmaceutical composition of embodiment A33, wherein the composition provides for at least a 5-fold increase in endolysosomal delivery in the target mammalian cell as compared to a composition comprising the same amount of a control ABPC.

[0952] Embodiment A35 is the pharmaceutical composition of any one of embodiments A1-A34, wherein the composition results in a less of a reduction in the level of CD22 presented on the surface of the target mammalian cell as compared to a composition comprising the same amount of a control ABPC.

[0953] Embodiment A36 is the pharmaceutical composition of any one of embodiments A1-A34, wherein the composition does not result in a detectable reduction in the level of the CD22 presented on the surface of the target mammalian cell.

[0954] Embodiment A37 is a pharmaceutical composition comprising an effective amount of an antigen-binding protein construct (ABPC) comprising: a first antigen-binding domain that is capable of specifically binding CD22 or an epitope of CD22 presented on the surface of a target mammalian cell; and a conjugated toxin, radioisotope, drug, or small molecule, wherein: (a) the dissociation rate of the first antigen-binding domain at a pH of about 4.0 to about 6.5 is faster than the dissociation rate at a pH of about 7.0 to about 8.0; or the dissociation constant (K_{D}) of the first antigen-binding domain at a pH of about 4.0 to about 6.5 is greater than the K_{D} at a pH of about 7.0 to about 8.0; and (b) the composition provides for one or more of: an increase in toxin liberation in the target mammalian cell as compared to a composition comprising the same amount of a control ABPC; an increase in target mammalian cell killing as compared to a composition comprising the same amount of a control ABPC; and an increase in endolysosomal delivery in the target mammalian cell as compared to a composition comprising the same amount of a control ABPC.

[0955] Embodiment A38 is the pharmaceutical composition of embodiment A37, wherein the first antigen-binding domain comprises a heavy chain variable domain of pinatuzumab with one or more amino acids substituted with a histidine.

[0956] Embodiment A39 is the pharmaceutical composition of embodiment A37, wherein the first antigen-binding domain comprises a light chain variable domain of pinatuzumab with one or more amino acids substituted with a histidine.

[0957] Embodiment A40 is the pharmaceutical composition of embodiment A37, wherein the first antigen-binding domain comprises: a heavy chain variable domain of pinatuzumab with one or more amino acids substituted with a histidine; and a light chain variable domain of pinatuzumab with one or more amino acids substituted with a histidine.

[0958] Embodiment A41 is the pharmaceutical composition of embodiment A38 or A40, wherein the heavy chain variable domain of pinatuzumab comprises SEQ ID NO: 143.

[0959] Embodiment A42 is the pharmaceutical composition of embodiment A39 or A40, wherein the light chain variable domain of pinatuzumab comprises SEQ ID NO: 144.

[0960] Embodiment A43 is the pharmaceutical composition of embodiment A37, wherein the first antigen-binding domain comprises a heavy chain variable domain comprising a CDR1, a CDR2, and a CDR3 of SEQ ID NOs: 145-147, respectively, with collectively a total of one or more amino acid positions in SEQ ID NOs: 145-147 substituted with a histidine.

[0961] Embodiment A44 is the pharmaceutical composition of embodiment A37, wherein the first CD22-binding domain comprises a light chain variable domain comprising a CDR1, a CDR2, and a CDR3 of SEQ ID NOs: 148-150, respectively, with collectively a total of one or more amino acid positions in SEQ ID NOs: 148-150 substituted with a histidine.

[0962] Embodiment A45 is the pharmaceutical composition of embodiment A37, wherein the first CD22-binding domain comprises: a heavy chain variable domain comprising a CDR1, a CDR2, and a CDR3 of SEQ ID NOs: 145-147, respectively, with collectively a total of one or more amino acid positions in SEQ ID NOs: 145-147 substituted with a histidine; and a light chain variable domain comprising a CDR1, a CDR2, and a CDR3 of SEQ ID NOs: 148-150, respectively, with collectively a total of one or more amino acid positions in SEQ ID NOs: 148-150 substituted with a histidine.

[0963] Embodiment A46 is the pharmaceutical composition of embodiment A37, A38, or A43, wherein the first antigen-binding domain comprises a heavy chain variable domain that is at least 90% identical to SEQ ID NO: 143, wherein the heavy chain variable domain includes a histidine at one or more positions in SEQ ID NO: 143 selected from the group consisting of: 27, 28, 29, 30, 31, 34, 35, 50, 51, 54, 57, 59, 64, 98, 101, 102, 106, and 107.

[0964] Embodiment A47 is the pharmaceutical composition of embodiment A37, A39, or A44, wherein the first antigen-binding domain comprises a light chain variable domain that is at least 90% identical to SEQ ID NO: 144.

[0965] Embodiment A48 is the pharmaceutical composition of embodiment A37, A38, or A43, wherein the first antigen-binding domain comprises a heavy chain variable domain that is at least 90% identical to SEQ ID NO: 143.

[0966] Embodiment A49 is the pharmaceutical composition of embodiment A37, A40, or A45, wherein the first antigen-binding domain comprises: a heavy chain variable domain that is at least 90% identical to SEQ ID NO: 143, wherein the heavy chain variable domain includes a histidine at one or more positions in SEQ ID NO: 143 selected from the group consisting of: 27, 28, 29, 30, 31, 34, 35, 50, 51, 54, 57, 59, 64, 98, 101, 102, 106, and 107; and a light chain variable domain that is at least 90% identical to SEQ ID NO: 144.

[0967] Embodiment A50 is the pharmaceutical composition of embodiment A37, wherein the first antigen-binding domain comprises a heavy chain variable domain of SEQ ID NO: 152, SEQ ID NO: 153, SEQ ID NO: 154, SEQ ID NO: 155, SEQ ID NO: 156, SEQ ID NO: 159, SEQ ID NO: 160, SEQ ID NO: 161, SEQ ID NO: 162, SEQ ID NO: 165, SEQ ID NO: 168, SEQ ID NO: 170, SEQ ID NO: 175, SEQ ID NO: 179, SEQ ID NO: 182, SEQ ID NO: 183, SEQ ID NO: 187, OR SEQ ID NO: 188.

[0968] Embodiment A51 is the pharmaceutical composition of embodiment A37 or A50, wherein the first antigen-binding domain comprises a light chain variable domain of SEQ ID NO: 144.

[0969] Embodiment A52 is the pharmaceutical composition of embodiment A37, wherein the first antigen-binding domain comprises a heavy chain variable domain.

[0970] Embodiment A53 is the pharmaceutical composition of embodiment A52, wherein the first antigen-binding domain comprises a light chain variable domain of SEQ ID NO: 144.

[0971] Embodiment A54 is the pharmaceutical composition of any one of embodiments A37-A53, wherein the composition provides for an increase in toxin liberation in the target mammalian cell as compared to a composition comprising the same amount of a control ABPC.

[0972] Embodiment A55 is the pharmaceutical composition of embodiment A54, wherein the composition provides for at least a 20% increase in toxin liberation in the target mammalian cell as compared to a composition comprising the same amount of a control ABPC.

[0973] Embodiment A56 is the pharmaceutical composition of embodiment A55, wherein the composition provides for at least a 50% increase in toxin liberation in the target mammalian cell as compared to a composition comprising the same amount of a control ABPC.

[0974] Embodiment A57 is the pharmaceutical composition of embodiment A54, wherein the composition provides for at least a 2-fold increase in toxin liberation in the target mammalian cell as compared to a composition comprising the same amount of a control ABPC.

[0975] Embodiment A58 is the pharmaceutical composition of embodiment A57, wherein the composition provides for at least a 5-fold increase in toxin liberation in the target mammalian cell as compared to a composition comprising the same amount of a control ABPC.

[0976] Embodiment A59 is the pharmaceutical composition of any one of embodiments A37-A58, wherein the composition provides for an increase in target mammalian cell killing as compared to a composition comprising the same amount of a control ABPC.

[0977] Embodiment A60 is the pharmaceutical composition of embodiment A59, wherein the composition provides for at least a 20% increase in target mammalian cell killing as compared to a composition comprising the same amount of a control ABPC.

[0978] Embodiment A61 is the pharmaceutical composition of embodiment A60, wherein the composition provides for at least a 50% increase in target mammalian cell killing as compared to a composition comprising the same amount of a control ABPC.

[0979] Embodiment A62 is the pharmaceutical composition of embodiment A59, wherein the composition provides for at least a 2-fold increase in target mammalian cell killing as compared to a composition comprising the same amount of a control ABPC.

[0980] Embodiment A63 is the pharmaceutical composition of embodiment A62, wherein the composition provides for at least a 5-fold increase in target mammalian cell killing as compared to a composition comprising the same amount of a control ABPC.

[0981] Embodiment A64 is the pharmaceutical composition of any one of embodiments A37-A63, wherein the composition provides for an increase in endolysosomal delivery in the target mammalian cell as compared to a composition comprising the same amount of a control ABPC.

[0982] Embodiment A65 is the pharmaceutical composition of embodiment A64, wherein the composition provides for at least a 20% increase in endolysosomal delivery in the target mammalian cell as compared to a composition comprising the same amount of a control ABPC.

[0983] Embodiment A66 is the pharmaceutical composition of embodiment A65, wherein the composition provides for at least a 50% increase in endolysosomal delivery in the target mammalian cell as compared to a composition comprising the same amount of a control ABPC.

[0984] Embodiment A67 is the pharmaceutical composition of embodiment A64, wherein the composition provides for at least a 2-fold increase in endolysosomal delivery in the target mammalian cell as compared to a composition comprising the same amount of a control ABPC.

[0985] Embodiment A68 is the pharmaceutical composition of embodiment A67, wherein the composition provides for at least a 5-fold increase in endolysosomal delivery in the target mammalian cell as compared to a composition comprising the same amount of a control ABPC.

[0986] Embodiment A69 is the pharmaceutical composition of any one of embodiments A37-A68, wherein the composition results in a less of a reduction in the level of CD22 presented on the surface of the target mammalian cell as compared to a composition comprising the same amount of a control ABPC.

[0987] Embodiment A70 is the pharmaceutical composition of any one of embodiments A37-A68, wherein the composition does not result in a detectable reduction in the level of the CD22 presented on the surface of the target mammalian cell.

[0988] Embodiment A71 is the pharmaceutical composition of any one of embodiments A1-A70, wherein the target mammalian cell is a cancer cell.

[0989] Embodiment A72 is the pharmaceutical composition of any one of embodiments A1-A71, wherein the dissociation rate of the antigen-binding domain at a pH of about 4.0 to about 6.5 is at least 10% faster than the dissociation rate of the antigen-binding domain at a pH of about 7.0 to about 8.0.

[0990] Embodiment A73 is the pharmaceutical composition of any one of embodiments A1-A71, wherein the dissociation rate of the antigen-binding domain at a pH of about 4.0 to about 6.5 is at least 3-fold faster than the dissociation rate of the antigen-binding domain at a pH of about 7.0 to about 8.0.

[0991] Embodiment A74 is the pharmaceutical composition of any one of embodiments A1-A71, wherein the dissociation rate of the antigen-binding domain at a pH of about 4.0 to about 6.5 is at least 10-fold faster than the dissociation rate of the antigen-binding domain at a pH of about 7.0 to about 8.0.

[0992] Embodiment A75 is the pharmaceutical composition of any one of embodiments A1-A74, wherein the K_{D} of the antigen-binding domain at a pH of about 4.0 to about 6.5 is at least 10% greater than the K_{D} of the antigen-binding domain at a pH of about 7.0 to about 8.0.

[0993] Embodiment A76 is the pharmaceutical composition of any one of embodiments A1-A74, wherein the K_{D} of the antigen-binding domain at a pH of about 4.0 to about 6.5 is at least 3-fold greater than the K_{D} of the antigen-binding domain at a pH of about 7.0 to about 8.0.

[0994] Embodiment A77 is the pharmaceutical composition of any one of embodiments A1-A74, wherein the K_{D} of the antigen-binding domain at a pH of about 4.0 to about 6.5 is at least 10-fold greater than the K_{D} of the antigen-binding domain at a pH of about 7.0 to about 8.0.

[0995] Embodiment A78 is the pharmaceutical composition of any one of embodiments A1-A77, wherein the ABPC is cytotoxic or cytostatic to the target mammalian cell.

[0996] Embodiment A79 is the pharmaceutical composition of any one of embodiments A1-A78, wherein the ABPC is cross-reactive with a non-human primate CD22 and human CD22.

[0997] Embodiment A80 is the pharmaceutical composition of any one of embodiments A1-A78, wherein the ABPC is cross-reactive with a non-human primate CD22, a human CD22, and one or both of rat CD22 and a mouse CD22.

[0998] Embodiment A81 is the pharmaceutical composition of embodiment A80, wherein the ABPC is cross-reactive with a non-human primate CD22, a human CD22, a rat CD22, and a mouse CD22.

[0999] Embodiment A82 is the pharmaceutical composition of any one of embodiments A1-A81, wherein the antigen-binding domain binds to an epitope of CD22 that is present on the surface of cells from an Old World Monkey.

[1000] Embodiment A83 is the pharmaceutical composition of any one of embodiments A1-A82, wherein the ABPC comprises a single polypeptide.

[1001] Embodiment A84 is the pharmaceutical composition of embodiment A83, wherein the antigen-binding domain is selected from the group consisting of: a VH domain, a VHH domain, a VNAR domain, and a scFv.

[1002] Embodiment A85 is the pharmaceutical composition of embodiment A83 or A84, wherein the ABPC is a BiTe, a (scFv)₂, a nanobody, a nanobody-HSA, a DART, a TandAb, a scDiabody, a scDiabody-CH3, scFv-CH-CL-scFv, a HSAbody, scDiabody-HSA, or a tandem-scFv.

[1003] Embodiment A86 is the pharmaceutical composition of any one of embodiments A1-A82, wherein the ABPC comprises two or more polypeptides.

[1004] Embodiment A87 is the pharmaceutical composition of embodiment A86, wherein the ABPC is selected from the group of an antibody, a VHH-scAb, a VHH-Fab, a Dual scFab, a F(ab′)₂, a diabody, a crossMab, a DAF (two-in-one), a DAF (four-in-one), a DutaMab, a DT-IgG, a knobs-in-holes common light chain, a knobs-in-holes assembly, a charge pair, a Fab-arm exchange, a SEEDbody, a LUZ-Y, a Fcab, a κλ-body, an orthogonal Fab, a DVD-IgG, a IgG(H)-scFv, a scFv-(H)IgG, IgG(L)-scFv, scFv-(L)IgG, IgG(L,H)-Fv, IgG(H)-V, V(H)-IgG, IgG(L)-V, V(L)-IgG, KIH IgG-scFab, 2scFv-IgG, IgG-2scFv, scFv4-Ig, Zybody, DVI-IgG, Diabody-CH3, a triple body, a miniantibody, a minibody, a TriBi minibody, scFv-CH3 KIH, Fab-scFv, a F(ab′)₂-scFv₂, a scFv-KIH, a Fab-scFv-Fc, a tetravalent HCAb, a scDiabody-Fc, a Diabody-Fc, a tandem scFv-Fc, a VHH-Fc, a tandem VHH-Fc, a VHH-Fc KiH, a Fab-VHH-Fc, an Intrabody, a dock and lock, an ImmTAC, an IgG-IgG conjugate, a Cov-X-Body, a scFv1-PEG-scFv2, an Adnectin, a DARPin, a fibronectin, and a DEP conjugate.

[1005] Embodiment A88 is the pharmaceutical composition of any one of embodiments A19-A87, wherein at least one polypeptide of the ABPC is conjugated to the toxin, the radioisotope, the drug, or the small molecule via a cleavable linker.

[1006] Embodiment A89 is the pharmaceutical composition of any one of embodiments A19-A87, wherein at least one polypeptide of the ABPC is conjugated to the toxin, the radioisotope, the drug, or the small molecule via a non-cleavable linker.

[1007] Embodiment A90 is the pharmaceutical composition of any of embodiments A1-A89, wherein the half-life of the ABPC in vivo is decreased as compared to the half-life of a control ABPC in vivo.

[1008] Embodiment A91 is the pharmaceutical composition of embodiment A90, wherein the half-life of the ABPC in vivo is decreased about 5% to about 95% as compared to the half-life of a control ABPC in vivo.

[1009] Embodiment A92 is the pharmaceutical composition of embodiment A90, wherein the half-life of the ABPC in vivo is decreased about 10% to about 95% as compared to the half-life of a control ABPC in vivo.

[1010] Embodiment A93 is the pharmaceutical composition of embodiment A90, wherein the half-life of the ABPC in vivo is decreased about 30% to about 95% as compared to the half-life of a control ABPC in vivo.

[1011] Embodiment A94 is the pharmaceutical composition of embodiment 90, wherein the half-life of the ABPC in vivo is decreased about 50% to about 95% as compared to the half-life of a control ABPC in vivo.

[1012] Embodiment A95 is the pharmaceutical composition of embodiment A90, wherein the half-life of the ABPC in vivo is decreased about 70% to about 95% as compared to the half-life of a control ABPC in vivo.

[1013] Embodiment A96 is the pharmaceutical composition of any one of embodiments A20-A95, wherein the control ABPC is capable of specifically binding to CD22 or an epitope of CD22 presented on the surface of a target mammalian cell, wherein: (a) the control ABPC comprises a first antigen-binding domain: (b) the dissociation rate of the first antigen-binding domain of the control ABPC at a pH of about 4.0 to about 6.5 is no more than 3-fold faster than the dissociation rate at a pH of about 7.0 to about 8.0; and (c) the dissociation constant (K_{D}) of the first antigen-binding domain of the control ABPC at a pH of about 4.0 to about 6.5 is no more than 3-fold greater than the K_{D} at a pH of about 7.0 to about 8.0.

[1014] Embodiment A97 is the pharmaceutical composition of any one of embodiments A20-A95, wherein the control ABPC is capable of specifically binding to CD22 or an epitope of CD22 presented on the surface of a target mammalian cell, wherein: (a) the control ABPC comprises a first antigen-binding domain; (b) the dissociation rate of the first antigen-binding domain of the control ABPC at a pH of about 4.0 to about 6.5 is no more than 2-fold faster than the dissociation rate at a pH of about 7.0 to about 8.0; and (c) the dissociation constant (K_{D}) of the first antigen-binding domain of the control ABPC at a pH of about 4.0 to about 6.5 is no more than 2-fold greater than the K_{D} at a pH of about 7.0 to about 8.0.

[1015] Embodiment A98 is the pharmaceutical composition of any one of embodiments A20-A95, wherein the control ABPC is capable of specifically binding to CD22 or an epitope of CD22 presented on the surface of a target mammalian cell, wherein: (a) the control ABPC comprises a first antigen-binding domain; (b) the dissociation rate of the first antigen-binding domain of the control ABPC at a pH of about 4.0 to about 6.5 is no more than 1-fold faster than the dissociation rate at a pH of about 7.0 to about 8.0; and (c) the dissociation constant (K_{D}) of the first antigen-binding domain of the control ABPC at a pH of about 4.0 to about 6.5 is no more than 1-fold greater than the K_{D} at a pH of about 7.0 to about 8.0.

[1016] Embodiment A99 is the pharmaceutical composition of any one of embodiments A20-A95, wherein the control ABPC is pinatuzumab.

[1017] Embodiment A100 is the pharmaceutical composition of any one of embodiments A1-A99, wherein the ABPC further comprises a second antigen-binding domain.

[1018] Embodiment A101 is a kit comprising at least one dose of the pharmaceutical composition of any one of embodiments A1-A100.

[1019] Embodiment A102 is an antigen-binding protein construct (ABPC) comprising: a first antigen-binding domain that is capable of specifically binding CD22 or an epitope of CD22 presented on the surface of a target mammalian cell, wherein: (a) the dissociation rate of the first antigen-binding domain at a pH of about 4.0 to about 6.5 is faster than the dissociation rate at a pH of about 7.0 to about 8.0; or (b) the dissociation constant (K_{D}) of the first antigen-binding domain at a pH of about 4.0 to about 6.5 is greater than the K_{D} at a pH of about 7.0 to about 8.0.

[1020] Embodiment A103 is the ABPC of embodiment A102, wherein the first antigen-binding domain comprises a heavy chain variable domain of pinatuzumab with one or more amino acids substituted with a histidine.

[1021] Embodiment A104 is the ABPC of embodiment A102, wherein the first antigen-binding domain comprises a light chain variable domain of pinatuzumab with one or more amino acids substituted with a histidine.

[1022] Embodiment A105 is the ABPC of embodiment A102, wherein the first antigen-binding domain comprises: a heavy chain variable domain of pinatuzumab with one or more amino acids substituted with a histidine; and a light chain variable domain of pinatuzumab with one or more amino acids substituted with a histidine.

[1023] Embodiment A106 is the ABPC of embodiment A103 or A105, wherein the heavy chain variable domain of pinatuzumab comprises SEQ ID NO: 143.

[1024] Embodiment A107 is the ABPC of embodiment A104 or A105, wherein the light chain variable domain of pinatuzumab comprises SEQ ID NO: 144.

[1025] Embodiment A108 is the ABPC of embodiment A102, wherein the first antigen-binding domain comprises a heavy chain variable domain comprising a CDR1, a CDR2, and a CDR3 of SEQ ID NOs: 145-147, respectively, with collectively a total of one or more amino acid positions in SEQ ID NOs: 145-147 substituted with a histidine.

[1026] Embodiment A109 is the ABPC of embodiment A102, wherein the first CD22-binding domain comprises a light chain variable domain comprising a CDR1, a CDR2, and a CDR3 of SEQ ID NOs: 148-150, respectively, with collectively a total of one or more amino acid positions in SEQ ID NOs: 148-150 substituted with a histidine.

[1027] Embodiment A110 is the ABPC of embodiment A102, wherein the first CD22-binding domain comprises: a heavy chain variable domain comprising a CDR1, a CDR2, and a CDR3 of SEQ ID NOs: 145-147, respectively, with collectively a total of one or more amino acid positions in SEQ ID NOs: 145-147 substituted with a histidine; and a light chain variable domain comprising a CDR1, a CDR2, and a CDR3 of SEQ ID NOs: 148-150, respectively, with collectively a total of one or more amino acid positions in SEQ ID NOs: 148-150 substituted with a histidine.

[1028] Embodiment A111 is the ABPC of embodiment A102, A103, or A108, wherein the first antigen-binding domain comprises a heavy chain variable domain that is at least 90% identical to SEQ ID NO: 143, wherein the heavy chain variable domain includes a histidine at one or more positions in SEQ ID NO: 143 selected from the group consisting of: 27, 28, 29, 30, 31, 34, 35, 50, 51, 54, 57, 59, 64, 98, 101, 102, 106, and 107.

[1029] Embodiment A112 is the ABPC of embodiment A102, A104, or a109, wherein the first antigen-binding domain comprises a light chain variable domain that is at least 90% identical to SEQ ID NO: 144.

[1030] Embodiment A113 is the ABPC of embodiment A102, A103, or A108, wherein the first antigen-binding domain comprises a heavy chain variable domain that is at least 90% identical to SEQ ID NO: 143.

[1031] Embodiment A114 is the ABPC of embodiment A102, A105, or A110, wherein the first antigen-binding domain comprises: a heavy chain variable domain that is at least 90% identical to SEQ ID NO: 143, wherein the heavy chain variable domain includes a histidine at one or more positions in SEQ ID NO: 143 selected from the group consisting of: 27, 28, 29, 30, 31, 34, 35, 50, 51, 54, 57, 59, 64, 98, 101, 102, 106, and 107; and a light chain variable domain that is at least 90% identical to SEQ ID NO: 144.

[1032] Embodiment A115 is the ABPC of embodiment A102, wherein the first antigen-binding domain comprises a heavy chain variable domain of SEQ ID NO: 152, SEQ ID NO: 153, SEQ ID NO: 154, SEQ ID NO: 155, SEQ ID NO: 156, SEQ ID NO: 159, SEQ ID NO: 160, SEQ ID NO: 161, SEQ ID NO: 162, SEQ ID NO: 165, SEQ ID NO: 168, SEQ ID NO: 170, SEQ ID NO: 175, SEQ ID NO: 179, SEQ ID NO: 182, SEQ ID NO: 183, SEQ ID NO: 187, OR SEQ ID NO: 188.

[1033] Embodiment A116 is the ABPC of embodiment A102 or A115, wherein the first antigen-binding domain comprises a light chain variable domain of SEQ ID NO: 144.

[1034] Embodiment A117 is the ABPC of embodiment A102, wherein the first antigen-binding domain comprises a heavy chain variable domain.

[1035] Embodiment A118 is the ABPC of embodiment A117, wherein the first antigen-binding domain comprises a light chain variable domain of SEQ ID NO: 144.

[1036] Embodiment A119 is the ABPC of any one of embodiments A102-A118, wherein the ABPC is degraded in the target mammalian cell following internalization of the ABPC by the target mammalian cell.

[1037] Embodiment A120 is the ABPC of any one of embodiments A102-A119, wherein the ABPC further comprises a conjugated toxin, radioisotope, drug, or small molecule.

[1038] Embodiment A121 is the ABPC of embodiment A120, wherein a composition comprising the ABPC provides for an increase in toxin liberation in the target mammalian cell as compared to a composition comprising the same amount of a control ABPC.

[1039] Embodiment A122 is the ABPC of embodiment A121, wherein a composition comprising the ABPC provides for at least a 20% increase in toxin liberation in the target mammalian cell as compared to a composition comprising the same amount of a control ABPC.

[1040] Embodiment A123 is the ABPC of embodiment A122, wherein a composition comprising the ABPC provides for at least a 50% increase in toxin liberation in the target mammalian cell as compared to a composition comprising the same amount of a control ABPC.

[1041] Embodiment A124 is the ABPC of embodiment A121, wherein a composition comprising the ABPC provides for at least a 2-fold increase in toxin liberation in the target mammalian cell as compared to a composition comprising the same amount of a control ABPC.

[1042] Embodiment A125 is the ABPC of embodiment A124, wherein a composition comprising the ABPC provides for at least a 5-fold increase in toxin liberation in the target mammalian cell as compared to a composition comprising the same amount of a control ABPC.

[1043] Embodiment A126 is the ABPC of any one of embodiments A120-A125, wherein a composition comprising the ABPC provides for an increase in target mammalian cell killing as compared to a composition comprising the same amount of a control ABPC.

[1044] Embodiment A127 is the ABPC of embodiment A126, wherein a composition comprising the ABPC provides for at least a 20% increase in target mammalian cell killing as compared to a composition comprising the same amount of a control ABPC.

[1045] Embodiment A128 is the ABPC of embodiment A127, wherein a composition comprising the ABPC provides for at least a 50% increase in target mammalian cell killing as compared to a composition comprising the same amount of a control ABPC.

[1046] Embodiment A129 is the ABPC of embodiment A126, wherein a composition comprising the ABPC provides for at least a 2-fold increase in target mammalian cell killing as compared to a composition comprising the same amount of a control ABPC.

[1047] Embodiment A130 is the ABPC of embodiment A129, wherein a composition comprising the ABPC provides for at least a 5-fold increase in target mammalian cell killing as compared to a composition comprising the same amount of a control ABPC.

[1048] Embodiment A131 is the ABPC of any one of embodiments A102-A130, wherein a composition comprising the ABPC provides for an increase in endolysosomal delivery in the target mammalian cell as compared to a composition comprising the same amount of a control ABPC.

[1049] Embodiment A132 is the ABPC of embodiment A131, wherein a composition comprising the ABPC provides for at least a 20% increase in endolysosomal delivery in the target mammalian cell as compared to a composition comprising the same amount of a control ABPC.

[1050] Embodiment A133 is the ABPC of embodiment A132, wherein a composition comprising the ABPC provides for at least a 50% increase in endolysosomal delivery in the target mammalian cell as compared to a composition comprising the same amount of a control ABPC.

[1051] Embodiment A134 is the ABPC of embodiment A131, wherein a composition comprising the ABPC provides for at least a 2-fold increase in endolysosomal delivery in the target mammalian cell as compared to a composition comprising the same amount of a control ABPC.

[1052] Embodiment A135 is the ABPC of embodiment A134, wherein a composition comprising the ABPC provides for at least a 5-fold increase in endolysosomal delivery in the target mammalian cell as compared to a composition comprising the same amount of a control ABPC.

[1053] Embodiment A136 is the ABPC of any one of embodiments A102-A135, wherein a composition comprising the ABPC results in a less of a reduction in the level of CD22 presented on the surface of the target mammalian cell as compared to a composition comprising the same amount of a control ABPC.

[1054] Embodiment A137 is the ABPC of any one of embodiments A102-A135, wherein a composition comprising the ABPC does not result in a detectable reduction in the level of the CD22 presented on the surface of the target mammalian cell.

[1055] Embodiment A138 is an antigen-binding protein construct (ABPC) comprising: a first antigen-binding domain that is capable of specifically binding CD22 or an epitope of CD22 presented on the surface of a target mammalian cell; and a conjugated toxin, radioisotope, drug, or small molecule, wherein: (a) the dissociation rate of the first antigen-binding domain at a pH of about 4.0 to about 6.5 is faster than the dissociation rate at a pH of about 7.0 to about 8.0; or the dissociation constant (K_{D}) of the first antigen-binding domain at a pH of about 4.0 to about 6.5 is greater than the K_{D} at a pH of about 7.0 to about 8.0; and (b) the composition provides for one or more of: an increase in toxin liberation in the target mammalian cell as compared to a composition comprising the same amount of a control ABPC; an increase in target mammalian cell killing as compared to a composition comprising the same amount of a control ABPC; and an increase in endolysosomal delivery in the target mammalian cell as compared to a composition comprising the same amount of a control ABPC.

[1056] Embodiment A139 is the ABPC of embodiment A138, wherein the first antigen-binding domain comprises a heavy chain variable domain of pinatuzumab with one or more amino acids substituted with a histidine.

[1057] Embodiment A140 is the ABPC of embodiment A138, wherein the first antigen-binding domain comprises a light chain variable domain of pinatuzumab with one or more amino acids substituted with a histidine.

[1058] Embodiment A141 is the ABPC of embodiment A138, wherein the first antigen-binding domain comprises: a heavy chain variable domain of pinatuzumab with one or more amino acids substituted with a histidine; and a light chain variable domain of pinatuzumab with one or more amino acids substituted with a histidine.

[1059] Embodiment A142 is the ABPC of embodiment A139 or A141, wherein the heavy chain variable domain of pinatuzumab comprises SEQ ID NO: 143.

[1060] Embodiment A143 is the ABPC of embodiment A140 or A141, wherein the light chain variable domain of pinatuzumab comprises SEQ ID NO: 144.

[1061] Embodiment A144 is the ABPC of embodiment A138, wherein the first antigen-binding domain comprises a heavy chain variable domain comprising a CDR1, a CDR2, and a CDR3 of SEQ ID NOs: 145-147, respectively, with collectively a total of one or more amino acid positions in SEQ ID NOs: 145-147 substituted with a histidine.

[1062] Embodiment A145 is the ABPC of embodiment A138, wherein the first CD22-binding domain comprises a light chain variable domain comprising a CDR1, a CDR2, and a CDR3 of SEQ ID NOs: 148-150, respectively, with collectively a total of one or more amino acid positions in SEQ ID NOs: 148-150 substituted with a histidine.

[1063] Embodiment A146 is the ABPC of embodiment A138, wherein the first CD22-binding domain comprises: a heavy chain variable domain comprising a CDR1, a CDR2, and a CDR3 of SEQ ID NOs: 145-147, respectively, with collectively a total of one or more amino acid positions in SEQ ID NOs: 145-147 substituted with a histidine; and a light chain variable domain comprising a CDR1, a CDR2, and a CDR3 of SEQ ID NOs: 148-150, respectively, with collectively a total of one or more amino acid positions in SEQ ID NOs: 148-150 substituted with a histidine.

[1064] Embodiment A147 is the ABPC of embodiment A138, A139, or A144, wherein the first antigen-binding domain comprises a heavy chain variable domain that is at least 90% identical to SEQ ID NO: 143, wherein the heavy chain variable domain includes a histidine at one or more positions in SEQ ID NO: 143 selected from the group consisting of: 27, 28, 29, 30, 31, 34, 35, 50, 51, 54, 57, 59, 64, 98, 101, 102, 106, and 107.

[1065] Embodiment A148 is the ABPC of embodiment A138, A140, or A145, wherein the first antigen-binding domain comprises a light chain variable domain that is at least 90% identical to SEQ ID NO: 144.

[1066] Embodiment A149 is the ABPC of embodiment A138, A139, or A144, wherein the first antigen-binding domain comprises a heavy chain variable domain that is at least 90% identical to SEQ ID NO: 143.

[1067] Embodiment A150 is the ABPC of embodiment A138, A141, or A146, wherein the first antigen-binding domain comprises: a heavy chain variable domain that is at least 90% identical to SEQ ID NO: 143, wherein the heavy chain variable domain includes a histidine at one or more positions in SEQ ID NO: 143 selected from the group consisting of: 27, 28, 29, 30, 31, 34, 35, 50, 51, 54, 57, 59, 64, 98, 101, 102, 106, and 107; and a light chain variable domain that is at least 90% identical to SEQ ID NO: 144.

[1068] Embodiment A151 is the ABPC of embodiment A138, wherein the first antigen-binding domain comprises a heavy chain variable domain of SEQ ID NO: 152, SEQ ID NO: 153, SEQ ID NO: 154, SEQ ID NO: 155, SEQ ID NO: 156, SEQ ID NO: 159, SEQ ID NO: 160, SEQ ID NO: 161, SEQ ID NO: 162, SEQ ID NO: 165, SEQ ID NO: 168, SEQ ID NO: 170, SEQ ID NO: 175, SEQ ID NO: 179, SEQ ID NO: 182, SEQ ID NO: 183, SEQ ID NO: 187, OR SEQ ID NO: 188.

[1069] Embodiment A152 is the ABPC of embodiment A138 or A151, wherein the first antigen-binding domain comprises a light chain variable domain of SEQ ID NO: 144.

[1070] Embodiment A153 is the ABPC of embodiment A138, wherein the first antigen-binding domain comprises a heavy chain variable domain.

[1071] Embodiment A154 is the ABPC of embodiment A153, wherein the first antigen-binding domain comprises a light chain variable domain of SEQ ID NO: 144.

[1072] Embodiment A 155 is the ABPC of any one of embodiments A138-A154, wherein a composition comprising the ABPC provides for an increase in toxin liberation in the target mammalian cell as compared to a composition comprising the same amount of a control ABPC.

[1073] Embodiment A156 is the ABPC of embodiment A155, wherein a composition comprising the ABPC provides for at least a 20% increase in toxin liberation in the target mammalian cell as compared to a composition comprising the same amount of a control ABPC.

[1074] Embodiment A157 is the ABPC of embodiment A156, wherein a composition comprising the ABPC provides for at least a 50% increase in toxin liberation in the target mammalian cell as compared to a composition comprising the same amount of a control ABPC.

[1075] Embodiment A158 is the ABPC of embodiment A155, wherein a composition comprising the ABPC provides for at least a 2-fold increase in toxin liberation in the target mammalian cell as compared to a composition comprising the same amount of a control ABPC.

[1076] Embodiment A159 is the ABPC of embodiment A158, wherein a composition comprising the ABPC provides for at least a 5-fold increase in toxin liberation in the target mammalian cell as compared to a composition comprising the same amount of a control ABPC.

[1077] Embodiment A160 is the ABPC of any one of embodiments A138-A159, wherein a composition comprising the ABPC provides for an increase in target mammalian cell killing as compared to a composition comprising the same amount of a control ABPC.

[1078] Embodiment A161 is the ABPC of embodiment A160, wherein a composition comprising the ABPC provides for at least a 20% increase in target mammalian cell killing as compared to a composition comprising the same amount of a control ABPC.

[1079] Embodiment A162 is the ABPC of embodiment A161, wherein a composition comprising the ABPC provides for at least a 50% increase in target mammalian cell killing as compared to a composition comprising the same amount of a control ABPC.

[1080] Embodiment A163 is the ABPC of embodiment A160, wherein a composition comprising the ABPC provides for at least a 2-fold increase in target mammalian cell killing as compared to a composition comprising the same amount of a control ABPC.

[1081] Embodiment A164 is the ABPC of embodiment A163, wherein a composition comprising the ABPC provides for at least a 5-fold increase in target mammalian cell killing as compared to a composition comprising the same amount of a control ABPC.

[1082] Embodiment A165 is the ABPC of any one of embodiments A138-A164, wherein a composition comprising the ABPC provides for an increase in endolysosomal delivery in the target mammalian cell as compared to a composition comprising the same amount of a control ABPC.

[1083] Embodiment A166 is the ABPC of embodiment A165, wherein a composition comprising the ABPC provides for at least a 20% increase in endolysosomal delivery in the target mammalian cell as compared to a composition comprising the same amount of a control ABPC.

[1084] Embodiment A167 is the ABPC of embodiment A166, wherein a composition comprising the ABPC provides for at least a 50% increase in endolysosomal delivery in the target mammalian cell as compared to a composition comprising the same amount of a control ABPC.

[1085] Embodiment A168 is the ABPC of embodiment A165, wherein a composition comprising the ABPC provides for at least a 2-fold increase in endolysosomal delivery in the target mammalian cell as compared to a composition comprising the same amount of a control ABPC.

[1086] Embodiment A169 is the ABPC of embodiment A168, wherein a composition comprising the ABPC provides for at least a 5-fold increase in endolysosomal delivery in the target mammalian cell as compared to a composition comprising the same amount of a control ABPC.

[1087] Embodiment A170 is the ABPC of any one of embodiments A138-A169, wherein a composition comprising the ABPC results in a less of a reduction in the level of CD22 presented on the surface of the target mammalian cell as compared to a composition comprising the same amount of a control ABPC.

[1088] Embodiment A171 is the ABPC of any one of embodiments A138-A169, wherein a composition comprising the ABPC does not result in a detectable reduction in the level of the CD22 presented on the surface of the target mammalian cell.

[1089] Embodiment A172 is the ABPC of any one of embodiments A102-A171, wherein the target mammalian cell is a cancer cell.

[1090] Embodiment A173 is the ABPC of any one of embodiments A102-A172, wherein the dissociation rate of the antigen-binding domain at a pH of about 4.0 to about 6.5 is at least 10% faster than the dissociation rate of the antigen-binding domain at a pH of about 7.0 to about 8.0.

[1091] Embodiment A174 is the ABPC of any one of embodiments A102-A172, wherein the dissociation rate of the antigen-binding domain at a pH of about 4.0 to about 6.5 is at least 3-fold faster than the dissociation rate of the antigen-binding domain at a pH of about 7.0 to about 8.0.

[1092] Embodiment A175 is the ABPC of any one of embodiments A102-A172, wherein the dissociation rate of the antigen-binding domain at a pH of about 4.0 to about 6.5 is at least 10-fold faster than the dissociation rate of the antigen-binding domain at a pH of about 7.0 to about 8.0.

[1093] Embodiment A176 is the ABPC of any one of embodiments A102-A175, wherein the K_{D} of the antigen-binding domain at a pH of about 4.0 to about 6.5 is at least 10% greater than the K_{D} of the antigen-binding domain at a pH of about 7.0 to about 8.0.

[1094] Embodiment A177 is the ABPC of any one of embodiments A102-A175, wherein the K_{D} of the antigen-binding domain at a pH of about 4.0 to about 6.5 is at least 3-fold greater than the K_{D} of the antigen-binding domain at a pH of about 7.0 to about 8.0.

[1095] Embodiment A178 is the ABPC of any one of embodiments A102-A175, wherein the K_{D} of the antigen-binding domain at a pH of about 4.0 to about 6.5 is at least 10-fold greater than the K_{D} of the antigen-binding domain at a pH of about 7.0 to about 8.0.

[1096] Embodiment A179 is the ABPC of any one of embodiments A102-A178, wherein the ABPC is cytotoxic or cytostatic to the target mammalian cell.

[1097] Embodiment A180 is the ABPC of any one of embodiments A102-A179, wherein the ABPC is cross-reactive with a non-human primate CD22 and human CD22.

[1098] Embodiment A181 is the pharmaceutical composition of any one of embodiments A102-A179, wherein the ABPC is cross-reactive with a non-human primate CD22, a human CD22, and one or both of rat CD22 and a mouse CD22.

[1099] Embodiment A182 is the pharmaceutical composition of embodiment A181, wherein the ABPC is cross-reactive with a non-human primate CD22, a human CD22, a rat CD22, and a mouse CD22.

[1100] Embodiment A183 is the ABPC of any one of embodiments A102-A182, wherein the antigen-binding domain binds to an epitope of CD22 that is present on the surface of cells from an Old World Monkey.

[1101] Embodiment A184 is the ABPC of any one of embodiments A102-A183, wherein the ABPC comprises a single polypeptide.

[1102] Embodiment A185 is the ABPC of embodiment A184, wherein the antigen-binding domain is selected from the group consisting of: a VH domain, a VHH domain, a VNAR domain, and a scFv.

[1103] Embodiment A186 is the ABPC of embodiment A184 or A185, wherein the ABPC is a BiTe, a (scFv)₂, a nanobody, a nanobody-HSA, a DART, a TandAb, a scDiabody, a scDiabody-CH3, scFv-CH-CL-scFv, a HSAbody, scDiabody-HSA, or a tandem-scFv.

[1104] Embodiment A187 is the ABPC of any one of embodiments A102-A183, wherein the ABPC comprises two or more polypeptides.

[1105] Embodiment A188 is the ABPC of embodiment A187, wherein the ABPC is selected from the group of an antibody, a VHH-scAb, a VHH-Fab, a Dual scFab, a F(ab′)₂, a diabody, a crossMab, a DAF (two-in-one), a DAF (four-in-one), a DutaMab, a DT-IgG, a knobs-in-holes common light chain, a knobs-in-holes assembly, a charge pair, a Fab-arm exchange, a SEEDbody, a LUZ-Y, a Fcab, a κλ-body, an orthogonal Fab, a DVD-IgG, a IgG(H)-scFv, a scFv-(H)IgG, IgG(L)-scFv, scFv-(L)IgG, IgG(L,H)-Fv, IgG(H)-V, V(H)-IgG, IgG(L)-V, V(L)-IgG, KIH IgG-scFab, 2scFv-IgG, IgG-2scFv, scFv4-Ig, Zybody, DVI-IgG, Diabody-CH3, a triple body, a miniantibody, a minibody, a TriBi minibody, scFv-CH3 KIH, Fab-scFv, a F(ab′)₂-scFv₂, a scFv-KIH, a Fab-scFv-Fc, a tetravalent HCAb, a scDiabody-Fc, a Diabody-Fc, a tandem scFv-Fc, a VHH-Fc, a tandem VHH-Fc, a VHH-Fc KiH, a Fab-VHH-Fc, an Intrabody, a dock and lock, an ImmTAC, an IgG-IgG conjugate, a Cov-X-Body, a scFv1-PEG-scFv2, an Adnectin, a DARPin, a fibronectin, and a DEP conjugate.

[1106] Embodiment A189 is the ABPC of any one of embodiments A120-A188, wherein at least one polypeptide of the ABPC is conjugated to the toxin, the radioisotope, the drug, or the small molecule via a cleavable linker.

[1107] Embodiment A190 is the ABPC of any one of embodiments A120-A188, wherein at least one polypeptide of the ABPC is conjugated to the toxin, the radioisotope, the drug, or the small molecule via a non-cleavable linker.

[1108] Embodiment A191 is the ABPC of any of embodiments A102-A190, wherein the half-life of the ABPC in vivo is decreased as compared to the half-life of a control ABPC in vivo.

[1109] Embodiment A192 is the ABPC of embodiment A191, wherein the half-life of the ABPC in vivo is decreased about 5% to about 95% as compared to the half-life of a control ABPC in vivo.

[1110] Embodiment A193 is the ABPC of embodiment A191, wherein the half-life of the ABPC in vivo is decreased about 10% to about 95% as compared to the half-life of a control ABPC in vivo.

[1111] Embodiment A194 is the ABPC of embodiment A191, wherein the half-life of the ABPC in vivo is decreased about 30% to about 95% as compared to the half-life of a control ABPC in vivo.

[1112] Embodiment A195 is the ABPC of embodiment A191, wherein the half-life of the ABPC in vivo is decreased about 50% to about 95% as compared to the half-life of a control ABPC in vivo.

[1113] Embodiment A196 is the ABPC of embodiment A191, wherein the half-life of the ABPC in vivo is decreased about 70% to about 95% as compared to the half-life of a control ABPC in vivo.

[1114] Embodiment A197 is the ABPC of any one of embodiments A121-A196, wherein the control ABPC is capable of specifically binding to CD22 or an epitope of CD22 presented on the surface of a target mammalian cell, wherein: (a) the control ABPC comprises a first antigen-binding domain; (b) the dissociation rate of the first antigen-binding domain of the control ABPC at a pH of about 4.0 to about 6.5 is no more than 3-fold faster than the dissociation rate at a pH of about 7.0 to about 8.0; and (c) the dissociation constant (K_{D}) of the first antigen-binding domain of the control ABPC at a pH of about 4.0 to about 6.5 is no more than 3-fold greater than the K_{D} at a pH of about 7.0 to about 8.0.

[1115] Embodiment A198 is the ABPC of any one of embodiments A121-A196, wherein the control ABPC is capable of specifically binding to CD22 or an epitope of CD22 presented on the surface of a target mammalian cell, wherein: (a) the control ABPC comprises a first antigen-binding domain; (b) the dissociation rate of the first antigen-binding domain of the control ABPC at a pH of about 4.0 to about 6.5 is no more than 2-fold faster than the dissociation rate at a pH of about 7.0 to about 8.0; and (c) the dissociation constant (K_{D}) of the first antigen-binding domain of the ABPC at a pH of about 4.0 to about 6.5 is no more than 2-fold greater than the K_{D} at a pH of about 7.0 to about 8.0.

[1116] Embodiment A199 is the ABPC of any one of embodiments A121-A196, wherein the control ABPC is capable of specifically binding to CD22 or an epitope of CD22 presented on the surface of a target mammalian cell, wherein: (a) the control ABPC comprises a first antigen-binding domain; (b) the dissociation rate of the first antigen-binding domain of the control ABPC at a pH of about 4.0 to about 6.5 is no more than 1-fold faster than the dissociation rate at a pH of about 7.0 to about 8.0; and (c) the dissociation constant (K_{D}) of the first antigen-binding domain of the control ABPC at a pH of about 4.0 to about 6.5 is no more than 1-fold greater than the K_{D} at a pH of about 7.0 to about 8.0.

[1117] Embodiment A200 is the ABPC of any one of embodiments A121-A196, wherein the control ABPC is pinatuzumab

[1118] Embodiment A201 is the ABPC of any one of embodiments A102-A200, wherein the ABPC further comprises a second antigen-binding domain.

[1119] Embodiment A202 is a kit comprising at least one dose of the ABPC of any one of embodiments A102-A201.

[1120] Embodiment A203 is a method of treating a cancer characterized by having a population of cancer cells that have CD22 or an epitope of CD22 presented on their surface, the method comprising: administering a therapeutically effective amount of the pharmaceutical composition of any one of embodiments A1-A100 or the ABPC of any one of embodiments A102-A201 to a subject identified as having a cancer characterized by having the population of cancer cells.

[1121] Embodiment A204 is a method of reducing the volume of a tumor in a subject, wherein the tumor is characterized by having a population of cancer cells that have CD22 or an epitope of CD22 presented on their surface, the method comprising: administering a therapeutically effective amount of the pharmaceutical composition of any one of embodiments 1-100 or the ABPC of any one of embodiments A102-A201 to a subject identified as having a cancer characterized by having the population of cancer cells.

[1122] Embodiment A205 is a method of inducing cell death in a cancer cell in a subject, wherein the cancer cell has CD22 or an epitope of CD22 presented on its surface, wherein the method comprises: administering a therapeutically effective amount of the pharmaceutical composition of any one of embodiments A1-A98 or the ABPC of any one of embodiments A102-A201 to a subject identified as having a cancer characterized by having a population of the cancer cells.

[1123] Embodiment A206 is the method of any one of embodiments A203-A205, wherein the cancer is a primary tumor.

[1124] Embodiment A207 is the method of any one of embodiments A203-A205, wherein the cancer is a metastasis.

[1125] Embodiment A208 is the method of any one of embodiments A203-A207, wherein the cancer is a non-T-cell-infiltrating tumor.

[1126] Embodiment A209 is the method of any one of embodiments A203-A207, wherein the cancer is a T-cell infiltrating tumor.

[1127] Embodiment A210 is a method of decreasing the risk of developing a metastasis or decreasing the risk of developing an additional metastasis in a subject having a cancer, wherein the cancer is characterized by having a population of cancer cells that have CD22 or an epitope of CD22 presented on their surface the method comprising: administering a therapeutically effective amount of the pharmaceutical composition of any one of embodiments A1-A100 or the ABPC of any one of embodiments A102-A201 to a subject identified as having a cancer characterized by having the population of cancer cells.

[1128] Embodiment A211 is the method of embodiment A210, wherein the cancer is a non-T-cell-infiltrating tumor.

[1129] Embodiment A212 is the method of embodiment A210, wherein the cancer is a T-cell infiltrating tumor.

### OTHER EMBODIMENTS

[1130] It is to be understood that while the invention has been described in conjunction with the detailed description thereof, the foregoing description is intended to illustrate and not limit the scope of the invention, which is defined by the scope of the appended claims. Other aspects, advantages, and modifications are within the scope of the following claims.

SEQUENCE APPENDIX

>Heavy Chain of Inotuzumab IgG (SEQ ID NO: 1)
EVQLVQSGAEVKKPGASVKVSCKASGYRFTNYWIHWVRQAPGQGLEWIGGINPGN
NYATYRRKFQGRVTMTADTSTSTVYMELSSLRSEDTAVYYCTREGYGNYGAWFAY
WGQGTLVTVSS
>Light Chain of Inotuzumab IgG (SEQ ID NO: 2)
DVQVTQSPSSLSASVGDRVTITCRSSQSLANSYGNTFLSWYLHKPGKAPQLLIYGISN
RFSGVPDRFSGSGSGTDFTLTISSLQPEDFATYYCLQGTHQPYTFGQGTKVEIK
>Heavy Chain CDR1 of Inotuzumab (SEQ ID NO: 3)
GYRFTNYWIH
>Heavy Chain CDR2 of Inotuzumab (SEQ ID NO: 4)
GINPGNNYATYRRKF
>Heavy Chain CDR3 of Inotuzumab (SEQ ID NO: 5)
TREGYGNYGAWFAY
>Light Chain CDR1 of Inotuzumab (SEQ ID NO: 6)
RSSQSLANSYGNTFLS
>Light Chain CDR2 of Inotuzumab (SEQ ID NO: 7)
GISNRFS
>Light Chain CDR3 of Inotuzumab (SEQ ID NO: 8)
LQGTHQPYT
>Mature Human CD22 (SEQ ID NO: 9)
DSSKWVFEHPETLYAWEGACVWIPCTYRALDGDLESFILFHNPEYNKNTSKFDGTRL
YESTKDGKVPSEQKRVQFLGDKNKNCTLSIHPVHLNDSGQLGLRMESKTEKWMERI
HLNVSERPFPPHIQLPPEIQESQEVTLTCLLNFSCYGYPIQLQWLLEGVPMRQAAVTST
SLTIKSVFTRSELKFSPQWSHHGKIVTCQLQDADGKFLSNDTVQLNVKHTPKLEIKVT
PSDAIVREGDSVTMTCEVSSSNPEYTTVSWLKDGTSLKKQNTFTLNLREVTKDQSGK
YCCQVSNDVGPGRSEEVFLQVQYAPEPSTVQILHSPAVEGSQVEFLCMSLANPLPTN
YTWYHNGKEMQGRTEEKVHIPKILPWHAGTYSCVAENILGTGQRGPGAELDVQYPP
KKVTTVIQNPMPIREGDTVTLSCNYNSSNPSVTRYEWKPHGAWEEPSLGVLKIQNVG
WDNTTIACAACNSWCSWASPVALNVQYAPRDVRVRKIKPLSEIHSGNSVSLQCDFSS
SHPKEVQFFWEKNGRLLGKESQLNFDSISPEDAGSYSCWVNNSIGQTASKAWTLEVL
YAPRRLRVSMSPGDQVMEGKSATLTCESDANPPVSHYTWFDWNNQSLPYHSQKLR
LEPVKVQHSGAYWCQGTNSVGKGRSPLSTLTVYYSPETIGRRVAVGLGSCLAILILAI
CGLKLQRRWKRTQSQQGLQENSSGQSFFVRNKKVRRAPLSEGPHSLGCYNPMMED
GISYTTLRFPEMNIPRTGDAESSEMQRPPPDCDDTVTYSALHKRQVGDYENVIPDFPE
DEGIHYSELIQFGVGERPQAQENVDYVILKH
>cDNA Encoding Mature Human CD22 (SEQ ID NO: 10)
GACTCAAGTAAATGGGTTTTTGAGCACCCTGAAACCCTCTACGCCTGGGAGGGG
GCCTGCGTCTGGATCCCCTGCACCTACAGAGCCCTAGATGGTGACCTGGAAAGCT
TCATCCTGTTCCACAATCCTGAGTATAACAAGAACACCTCGAAGTTTGATGGGAC
AAGACTCTATGAAAGCACAAAGGATGGGAAGGTTCCTTCTGAGCAGAAAAGGGT
GCAATTCCTGGGAGACAAGAATAAGAACTGCACACTGAGTATCCACCCGGTGCA
CCTCAATGACAGTGGTCAGCTGGGGCTGAGGATGGAGTCCAAGACTGAGAAATG
GATGGAACGAATACACCTCAATGTCTCTGAAAGGCCTTTTCCACCTCATATCCAG
CTCCCTCCAGAAATTCAAGAGTCCCAGGAAGTCACTCTGACCTGCTTGCTGAATT
TCTCCTGCTATGGGTATCCGATCCAATTGCAGTGGCTCCTAGAGGGGGTTCCAAT
GAGGCAGGCTGCTGTCACCTCGACCTCCTTGACCATCAAGTCTGTCTTCACCCGG
AGCGAGCTCAAGTTCTCCCCACAGTGGAGTCACCATGGGAAGATTGTGACCTGC
CAGCTTCAGGATGCAGATGGGAAGTTCCTCTCCAATGACACGGTGCAGCTGAAC
GTGAAGCACACCCCGAAGTTGGAGATCAAGGTCACTCCCAGTGATGCCATAGTG
AGGGAGGGGGACTCTGTGACCATGACCTGCGAGGTCAGCAGCAGCAACCCGGAG
TACACGACGGTATCCTGGCTCAAGGATGGGACCTCGCTGAAGAAGCAGAATACA
TTCACGCTAAACCTGCGCGAAGTGACCAAGGACCAGAGTGGGAAGTACTGCTGT
CAGGTCTCCAATGACGTGGGCCCGGGAAGGTCGGAAGAAGTGTTCCTGCAAGTG
CAGTATGCCCCGGAACCTTCCACGGTTCAGATCCTCCACTCACCGGCTGTGGAGG
GAAGTCAAGTCGAGTTTCTTTGCATGTCACTGGCCAATCCTCTTCCAACAAATTA
CACGTGGTACCACAATGGGAAAGAAATGCAGGGAAGGACAGAGGAGAAAGTCC
ACATCCCAAAGATCCTCCCCTGGCACGCTGGGACTTATTCCTGTGTGGCAGAAAA
CATTCTTGGTACTGGACAGAGGGGCCCGGGAGCTGAGCTGGATGTCCAGTATCCT
CCCAAGAAGGTGACCACAGTGATTCAAAACCCCATGCCGATTCGAGAAGGAGAC
ACAGTGACCCTTTCCTGTAACTACAATTCCAGTAACCCCAGTGTTACCCGGTATG
AATGGAAACCCCATGGCGCCTGGGAGGAGCCATCGCTTGGGGTGCTGAAGATCC
AAAACGTTGGCTGGGACAACACAACCATCGCCTGCGCAGCTTGTAATAGTTGGT
GCTCGTGGGCCTCCCCTGTCGCCCTGAATGTCCAGTATGCCCCCCGAGACGTGAG
GGTCCGGAAAATCAAGCCCCTTTCCGAGATTCACTCTGGAAACTCGGTCAGCCTC
CAATGTGACTTCTCAAGCAGCCACCCCAAAGAAGTCCAGTTCTTCTGGGAGAAA
AATGGCAGGCTTCTGGGGAAAGAAAGCCAGCTGAATTTTGACTCCATCTCCCCA
GAAGATGCTGGGAGTTACAGCTGCTGGGTGAACAACTCCATAGGACAGACAGCG
TCCAAGGCCTGGACACTTGAAGTGCTGTATGCACCCAGGAGGCTGCGTGTGTCCA
TGAGCCCGGGGGACCAAGTGATGGAGGGGAAGAGTGCAACCCTGACCTGTGAG
AGCGACGCCAACCCTCCCGTCTCCCACTACACCTGGTTTGACTGGAATAACCAAA
GCCTCCCCTACCACAGCCAGAAGCTGAGATTGGAGCCGGTGAAGGTCCAGCACT
CGGGTGCCTACTGGTGCCAGGGGACCAACAGTGTGGGCAAGGGCCGTTCGCCTC
TCAGCACCCTCACCGTCTACTATAGCCCGGAGACCATCGGCAGGCGAGTGGCTGT
GGGACTCGGGTCCTGCCTCGCCATCCTCATCCTGGCAATCTGTGGGCTCAAGCTC
CAGCGACGTTGGAAGAGGACACAGAGCCAGCAGGGGCTTCAGGAGAATTCCAG
CGGCCAGAGCTTCTTTGTGAGGAATAAAAAGGTTAGAAGGGCCCCCCTCTCTGA
AGGCCCCCACTCCCTGGGATGCTACAATCCAATGATGGAAGATGGCATTAGCTA
CACCACCCTGCGCTTTCCCGAGATGAACATACCACGAACTGGAGATGCAGAGTC
CTCAGAGATGCAGAGACCTCCCCCGGACTGCGATGACACGGTCACTTATTCAGC
ATTGCACAAGCGCCAAGTGGGCGACTATGAGAACGTCATTCCAGATTTTCCAGA
AGATGAGGGGATTCATTACTCAGAGCTGATCCAGTTTGGGGTCGGGGAGCGGCC
TCAGGCACAAGAAAATGTGGACTATGTGATCCTCAAACAT
>Extracellular Domain of CD22 (SEQ ID NO: 11)
DSSKWVFEHPETLYAWEGACVWIPCTYRALDGDLESFILFHNPEYNKNTSKFDGTRL
YESTKDGKVPSEQKRVQFLGDKNKNCTLSIHPVHLNDSGQLGLRMESKTEKWMERI
HLNVSERPFPPHIQLPPEIQESQEVTLTCLLNFSCYGYPIQLQWLLEGVPMRQAAVTST
SLTIKSVFTRSELKFSPQWSHHGKIVTCQLQDADGKFLSNDTVQLNVKHTPKLEIKVT
PSDAIVREGDSVTMTCEVSSSNPEYTTVSWLKDGTSLKKQNTFTLNLREVTKDQSGK
YCCQVSNDVGPGRSEEVFLQVQYAPEPSTVQILHSPAVEGSQVEFLCMSLANPLPTN
YTWYHNGKEMQGRTEEKVHIPKILPWHAGTYSCVAENILGTGQRGPGAELDVQYPP
KKVTTVIQNPMPIREGDTVTLSCNYNSSNPSVTRYEWKPHGAWEEPSLGVLKIQNVG
WDNTTIACAACNSWCSWASPVALNVQYAPRDVRVRKIKPLSEIHSGNSVSLQCDFSS
SHPKEVQFFWEKNGRLLGKESQLNFDSISPEDAGSYSCWVNNSIGQTASKAWTLEVL
YAPRRLRVSMSPGDQVMEGKSATLTCESDANPPVSHYTWFDWNNQSLPYHSQKLR
LEPVKVQHSGAYWCQGTNSVGKGRSPLSTLTVYYSPETIGRR
>cDNA Encoding Extracellular Domain of CD22 (SEQ ID NO: 12)
GACTCAAGTAAATGGGTTTTTGAGCACCCTGAAACCCTCTACGCCTGGGAGGGG
GCCTGCGTCTGGATCCCCTGCACCTACAGAGCCCTAGATGGTGACCTGGAAAGCT
TCATCCTGTTCCACAATCCTGAGTATAACAAGAACACCTCGAAGTTTGATGGGAC
AAGACTCTATGAAAGCACAAAGGATGGGAAGGTTCCTTCTGAGCAGAAAAGGGT
GCAATTCCTGGGAGACAAGAATAAGAACTGCACACTGAGTATCCACCCGGTGCA
CCTCAATGACAGTGGTCAGCTGGGGCTGAGGATGGAGTCCAAGACTGAGAAATG
GATGGAACGAATACACCTCAATGTCTCTGAAAGGCCTTTTCCACCTCATATCCAG
CTCCCTCCAGAAATTCAAGAGTCCCAGGAAGTCACTCTGACCTGCTTGCTGAATT
TCTCCTGCTATGGGTATCCGATCCAATTGCAGTGGCTCCTAGAGGGGGTTCCAAT
GAGGCAGGCTGCTGTCACCTCGACCTCCTTGACCATCAAGTCTGTCTTCACCCGG
AGCGAGCTCAAGTTCTCCCCACAGTGGAGTCACCATGGGAAGATTGTGACCTGC
CAGCTTCAGGATGCAGATGGGAAGTTCCTCTCCAATGACACGGTGCAGCTGAAC
GTGAAGCACACCCCGAAGTTGGAGATCAAGGTCACTCCCAGTGATGCCATAGTG
AGGGAGGGGGACTCTGTGACCATGACCTGCGAGGTCAGCAGCAGCAACCCGGAG
TACACGACGGTATCCTGGCTCAAGGATGGGACCTCGCTGAAGAAGCAGAATACA
TTCACGCTAAACCTGCGCGAAGTGACCAAGGACCAGAGTGGGAAGTACTGCTGT
CAGGTCTCCAATGACGTGGGCCCGGGAAGGTCGGAAGAAGTGTTCCTGCAAGTG
CAGTATGCCCCGGAACCTTCCACGGTTCAGATCCTCCACTCACCGGCTGTGGAGG
GAAGTCAAGTCGAGTTTCTTTGCATGTCACTGGCCAATCCTCTTCCAACAAATTA
CACGTGGTACCACAATGGGAAAGAAATGCAGGGAAGGACAGAGGAGAAAGTCC
ACATCCCAAAGATCCTCCCCTGGCACGCTGGGACTTATTCCTGTGTGGCAGAAAA
CATTCTTGGTACTGGACAGAGGGGCCCGGGAGCTGAGCTGGATGTCCAGTATCCT
CCCAAGAAGGTGACCACAGTGATTCAAAACCCCATGCCGATTCGAGAAGGAGAC
ACAGTGACCCTTTCCTGTAACTACAATTCCAGTAACCCCAGTGTTACCCGGTATG
AATGGAAACCCCATGGCGCCTGGGAGGAGCCATCGCTTGGGGTGCTGAAGATCC
AAAACGTTGGCTGGGACAACACAACCATCGCCTGCGCAGCTTGTAATAGTTGGT
GCTCGTGGGCCTCCCCTGTCGCCCTGAATGTCCAGTATGCCCCCCGAGACGTGAG
GGTCCGGAAAATCAAGCCCCTTTCCGAGATTCACTCTGGAAACTCGGTCAGCCTC
CAATGTGACTTCTCAAGCAGCCACCCCAAAGAAGTCCAGTTCTTCTGGGAGAAA
AATGGCAGGCTTCTGGGGAAAGAAAGCCAGCTGAATTTTGACTCCATCTCCCCA
GAAGATGCTGGGAGTTACAGCTGCTGGGTGAACAACTCCATAGGACAGACAGCG
TCCAAGGCCTGGACACTTGAAGTGCTGTATGCACCCAGGAGGCTGCGTGTGTCCA
TGAGCCCGGGGGACCAAGTGATGGAGGGGAAGAGTGCAACCCTGACCTGTGAG
AGCGACGCCAACCCTCCCGTCTCCCACTACACCTGGTTTGACTGGAATAACCAAA
GCCTCCCCTACCACAGCCAGAAGCTGAGATTGGAGCCGGTGAAGGTCCAGCACT
CGGGTGCCTACTGGTGCCAGGGGACCAACAGTGTGGGCAAGGGCCGTTCGCCTC
TCAGCACCCTCACCGTCTACTATAGCCCGGAGACCATCGGCAGGCGA
>Heavy Chain of Inotuzumab IgG histidine scanning variant #1 (SEQ ID NO: 13)
EVQLVQSGAEVKKPGASVKVSCKASHYRFTNYWIHWVRQAPGQGLEWIGGINPGN
NYATYRRKFQGRVTMTADTSTSTVYMELSSLRSEDTAVYYCTREGYGNYGAWFAY
WGQGTLVTVSS
>Heavy Chain of Inotuzumab IgG histidine scanning variant #2 (SEQ ID NO: 14)
EVQLVQSGAEVKKPGASVKVSCKASGHRFTNYWIHWVRQAPGQGLEWIGGINPGN
NYATYRRKFQGRVTMTADTSTSTVYMELSSLRSEDTAVYYCTREGYGNYGAWFAY
WGQGTLVTVSS
>Heavy Chain of Inotuzumab IgG histidine scanning variant #3 (SEQ ID NO: 15)
EVQLVQSGAEVKKPGASVKVSCKASGYHFTNYWIHWVRQAPGQGLEWIGGINPGN
NYATYRRKFQGRVTMTADTSTSTVYMELSSLRSEDTAVYYCTREGYGNYGAWFAY
WGQGTLVTVSS
>Heavy Chain of Inotuzumab IgG histidine scanning variant #4 (SEQ ID NO: 16)
EVQLVQSGAEVKKPGASVKVSCKASGYRHTNYWIHWVRQAPGQGLEWIGGINPGN
NYATYRRKFQGRVTMTADTSTSTVYMELSSLRSEDTAVYYCTREGYGNYGAWFAY
WGQGTLVTVSS
>Heavy Chain of Inotuzumab IgG histidine scanning variant #5 (SEQ ID NO: 17)
EVQLVQSGAEVKKPGASVKVSCKASGYRFHNYWIHWVRQAPGQGLEWIGGINPGN
NYATYRRKFQGRVTMTADTSTSTVYMELSSLRSEDTAVYYCTREGYGNYGAWFAY
WGQGTLVTVSS
>Heavy Chain of Inotuzumab IgG histidine scanning variant #6 (SEQ ID NO: 18)
EVQLVQSGAEVKKPGASVKVSCKASGYRFTHYWIHWVRQAPGQGLEWIGGINPGN
NYATYRRKFQGRVTMTADTSTSTVYMELSSLRSEDTAVYYCTREGYGNYGAWFAY
WGQGTLVTVSS
>Heavy Chain of Inotuzumab IgG histidine scanning variant #7 (SEQ ID NO: 19)
EVQLVQSGAEVKKPGASVKVSCKASGYRFTNHWIHWVRQAPGQGLEWIGGINPGN
NYATYRRKFQGRVTMTADTSTSTVYMELSSLRSEDTAVYYCTREGYGNYGAWFAY
WGQGTLVTVSS
>Heavy Chain of Inotuzumab IgG histidine scanning variant #8 (SEQ ID NO: 20)
EVQLVQSGAEVKKPGASVKVSCKASGYRFTNYHIHWVRQAPGQGLEWIGGINPGNN
YATYRRKFQGRVTMTADTSTSTVYMELSSLRSEDTAVYYCTREGYGNYGAWFAYW
GQGTLVTVSS
>Heavy Chain of Inotuzumab IgG histidine scanning variant #9 (SEQ ID NO: 21)
EVQLVQSGAEVKKPGASVKVSCKASGYRFTNYWHHWVRQAPGQGLEWIGGINPGN
NYATYRRKFQGRVTMTADTSTSTVYMELSSLRSEDTAVYYCTREGYGNYGAWFAY
WGQGTLVTVSS
>Heavy Chain of Inotuzumab IgG histidine scanning variant #10 (SEQ ID NO: 22)
EVQLVQSGAEVKKPGASVKVSCKASGYRFTNYWIAWVRQAPGQGLEWIGGINPGN
NYATYRRKFQGRVTMTADTSTSTVYMELSSLRSEDTAVYYCTREGYGNYGAWFAY
WGQGTLVTVSS
>Heavy Chain of Inotuzumab IgG histidine scanning variant #11 (SEQ ID NO: 23)
EVQLVQSGAEVKKPGASVKVSCKASGYRFTNYWIHWVRQAPGQGLEWIGHINPGN
NYATYRRKFQGRVTMTADTSTSTVYMELSSLRSEDTAVYYCTREGYGNYGAWFAY
WGQGTLVTVSS
>Heavy Chain of Inotuzumab IgG histidine scanning variant #12 (SEQ ID NO: 24)
EVQLVQSGAEVKKPGASVKVSCKASGYRFTNYWIHWVRQAPGQGLEWIGGHNPGN
NYATYRRKFQGRVTMTADTSTSTVYMELSSLRSEDTAVYYCTREGYGNYGAWFAY
WGQGTLVTVSS
>Heavy Chain of Inotuzumab IgG histidine scanning variant #13 (SEQ ID NO: 25)
EVQLVQSGAEVKKPGASVKVSCKASGYRFTNYWIHWVRQAPGQGLEWIGGIHPGN
NYATYRRKFQGRVTMTADTSTSTVYMELSSLRSEDTAVYYCTREGYGNYGAWFAY
WGQGTLVTVSS
>Heavy Chain of Inotuzumab IgG histidine scanning variant #14 (SEQ ID NO: 26)
EVQLVQSGAEVKKPGASVKVSCKASGYRFTNYWIHWVRQAPGQGLEWIGGINHGN
NYATYRRKFQGRVTMTADTSTSTVYMELSSLRSEDTAVYYCTREGYGNYGAWFAY
WGQGTLVTVSS
>Heavy Chain of Inotuzumab IgG histidine scanning variant #15 (SEQ ID NO: 27)
EVQLVQSGAEVKKPGASVKVSCKASGYRFTNYWIHWVRQAPGQGLEWIGGINPHN
NYATYRRKFQGRVTMTADTSTSTVYMELSSLRSEDTAVYYCTREGYGNYGAWFAY
WGQGTLVTVSS
>Heavy Chain of Inotuzumab IgG histidine scanning variant #16 (SEQ ID NO: 28)
EVQLVQSGAEVKKPGASVKVSCKASGYRFTNYWIHWVRQAPGQGLEWIGGINPGH
NYATYRRKFQGRVTMTADTSTSTVYMELSSLRSEDTAVYYCTREGYGNYGAWFAY
WGQGTLVTVSS
>Heavy Chain of Inotuzumab IgG histidine scanning variant #17 (SEQ ID NO: 29)
EVQLVQSGAEVKKPGASVKVSCKASGYRFTNYWIHWVRQAPGQGLEWIGGINPGN
HYATYRRKFQGRVTMTADTSTSTVYMELSSLRSEDTAVYYCTREGYGNYGAWFAY
WGQGTLVTVSS
>Heavy Chain of Inotuzumab IgG histidine scanning variant #18 (SEQ ID NO: 30)
EVQLVQSGAEVKKPGASVKVSCKASGYRFTNYWIHWVRQAPGQGLEWIGGINPGN
NHATYRRKFQGRVTMTADTSTSTVYMELSSLRSEDTAVYYCTREGYGNYGAWFAY
WGQGTLVTVSS
>Heavy Chain of Inotuzumab IgG histidine scanning variant #19 (SEQ ID NO: 31)
EVQLVQSGAEVKKPGASVKVSCKASGYRFTNYWIHWVRQAPGQGLEWIGGINPGN
NYHTYRRKFQGRVTMTADTSTSTVYMELSSLRSEDTAVYYCTREGYGNYGAWFAY
WGQGTLVTVSS
>Heavy Chain of Inotuzumab IgG histidine scanning variant #20 (SEQ ID NO: 32)
EVQLVQSGAEVKKPGASVKVSCKASGYRFTNYWIHWVRQAPGQGLEWIGGINPGN
NYAHYRRKFQGRVTMTADTSTSTVYMELSSLRSEDTAVYYCTREGYGNYGAWFAY
WGQGTLVTVSS
>Heavy Chain of Inotuzumab IgG histidine scanning variant #21 (SEQ ID NO: 33)
EVQLVQSGAEVKKPGASVKVSCKASGYRFTNYWIHWVRQAPGQGLEWIGGINPGN
NYATHRRKFQGRVTMTADTSTSTVYMELSSLRSEDTAVYYCTREGYGNYGAWFAY
WGQGTLVTVSS
>Heavy Chain of Inotuzumab IgG histidine scanning variant #22 (SEQ ID NO: 34)
EVQLVQSGAEVKKPGASVKVSCKASGYRFTNYWIHWVRQAPGQGLEWIGGINPGN
NYATYHRKFQGRVTMTADTSTSTVYMELSSLRSEDTAVYYCTREGYGNYGAWFAY
WGQGTLVTVSS
>Heavy Chain of Inotuzumab IgG histidine scanning variant #23 (SEQ ID NO: 35)
EVQLVQSGAEVKKPGASVKVSCKASGYRFTNYWIHWVRQAPGQGLEWIGGINPGN
NYATYRHKFQGRVTMTADTSTSTVYMELSSLRSEDTAVYYCTREGYGNYGAWFAY
WGQGTLVTVSS
>Heavy Chain of Inotuzumab IgG histidine scanning variant #24 (SEQ ID NO: 36)
EVQLVQSGAEVKKPGASVKVSCKASGYRFTNYWIHWVRQAPGQGLEWIGGINPGN
NYATYRRHFQGRVTMTADTSTSTVYMELSSLRSEDTAVYYCTREGYGNYGAWFAY
WGQGTLVTVSS
>Heavy Chain of Inotuzumab IgG histidine scanning variant #25 (SEQ ID NO: 37)
EVQLVQSGAEVKKPGASVKVSCKASGYRFTNYWIHWVRQAPGQGLEWIGGINPGN
NYATYRRKHQGRVTMTADTSTSTVYMELSSLRSEDTAVYYCTREGYGNYGAWFAY
WGQGTLVTVSS
>Heavy Chain of Inotuzumab IgG histidine scanning variant #26 (SEQ ID NO: 38)
EVQLVQSGAEVKKPGASVKVSCKASGYRFTNYWIHWVRQAPGQGLEWIGGINPGN
NYATYRRKFQGRVTMTADTSTSTVYMELSSLRSEDTAVYYCHREGYGNYGAWFAY
WGQGTLVTVSS
>Heavy Chain of Inotuzumab IgG histidine scanning variant #27 (SEQ ID NO: 39)
EVQLVQSGAEVKKPGASVKVSCKASGYRFTNYWIHWVRQAPGQGLEWIGGINPGN
NYATYRRKFQGRVTMTADTSTSTVYMELSSLRSEDTAVYYCTHEGYGNYGAWFAY
WGQGTLVTVSS
>Heavy Chain of Inotuzumab IgG histidine scanning variant #28 (SEQ ID NO: 40)
EVQLVQSGAEVKKPGASVKVSCKASGYRFTNYWIHWVRQAPGQGLEWIGGINPGN
NYATYRRKFQGRVTMTADTSTSTVYMELSSLRSEDTAVYYCTRHGYGNYGAWFAY
WGQGTLVTVSS
>Heavy Chain of Inotuzumab IgG histidine scanning variant #29 (SEQ ID NO: 41)
EVQLVQSGAEVKKPGASVKVSCKASGYRFTNYWIHWVRQAPGQGLEWIGGINPGN
NYATYRRKFQGRVTMTADTSTSTVYMELSSLRSEDTAVYYCTREHYGNYGAWFAY
WGQGTLVTVSS
>Heavy Chain of Inotuzumab IgG histidine scanning variant #30 (SEQ ID NO: 42)
EVQLVQSGAEVKKPGASVKVSCKASGYRFTNYWIHWVRQAPGQGLEWIGGINPGN
NYATYRRKFQGRVTMTADTSTSTVYMELSSLRSEDTAVYYCTREGHGNYGAWFAY
WGQGTLVTVSS
>Heavy Chain of Inotuzumab IgG histidine scanning variant #31 (SEQ ID NO: 43)
EVQLVQSGAEVKKPGASVKVSCKASGYRFTNYWIHWVRQAPGQGLEWIGGINPGN
NYATYRRKFQGRVTMTADTSTSTVYMELSSLRSEDTAVYYCTREGYHNYGAWFAY
WGQGTLVTVSS
>Heavy Chain of Inotuzumab IgG histidine scanning variant #32 (SEQ ID NO: 44)
EVQLVQSGAEVKKPGASVKVSCKASGYRFTNYWIHWVRQAPGQGLEWIGGINPGN
NYATYRRKFQGRVTMTADTSTSTVYMELSSLRSEDTAVYYCTREGYGHYGAWFAY
WGQGTLVTVSS
>Heavy Chain of Inotuzumab IgG histidine scanning variant #33 (SEQ ID NO: 45)
EVQLVQSGAEVKKPGASVKVSCKASGYRFTNYWIHWVRQAPGQGLEWIGGINPGN
NYATYRRKFQGRVTMTADTSTSTVYMELSSLRSEDTAVYYCTREGYGNHGAWFAY
WGQGTLVTVSS
>Heavy Chain of Inotuzumab IgG histidine scanning variant #34 (SEQ ID NO: 46)
EVQLVQSGAEVKKPGASVKVSCKASGYRFTNYWIHWVRQAPGQGLEWIGGINPGN
NYATYRRKFQGRVTMTADTSTSTVYMELSSLRSEDTAVYYCTREGYGNYHAWFAY
WGQGTLVTVSS
>Heavy Chain of Inotuzumab IgG histidine scanning variant #35 (SEQ ID NO: 47)
EVQLVQSGAEVKKPGASVKVSCKASGYRFTNYWIHWVRQAPGQGLEWIGGINPGN
NYATYRRKFQGRVTMTADTSTSTVYMELSSLRSEDTAVYYCTREGYGNYGHWFAY
WGQGTLVTVSS
>Heavy Chain of Inotuzumab IgG histidine scanning variant #36 (SEQ ID NO: 48)
EVQLVQSGAEVKKPGASVKVSCKASGYRFTNYWIHWVRQAPGQGLEWIGGINPGN
NYATYRRKFQGRVTMTADTSTSTVYMELSSLRSEDTAVYYCTREGYGNYGAHFAY
WGQGTLVTVSS
>Heavy Chain of Inotuzumab IgG histidine scanning variant #37 (SEQ ID NO: 49)
EVQLVQSGAEVKKPGASVKVSCKASGYRFTNYWIHWVRQAPGQGLEWIGGINPGN
NYATYRRKFQGRVTMTADTSTSTVYMELSSLRSEDTAVYYCTREGYGNYGAWHAY
WGQGTLVTVSS
>Heavy Chain of Inotuzumab IgG histidine scanning variant #38 (SEQ ID NO: 50)
EVQLVQSGAEVKKPGASVKVSCKASGYRFTNYWIHWVRQAPGQGLEWIGGINPGN
NYATYRRKFQGRVTMTADTSTSTVYMELSSLRSEDTAVYYCTREGYGNYGAWFHY
WGQGTLVTVSS
>Heavy Chain of Inotuzumab IgG histidine scanning variant #39 (SEQ ID NO: 51)
EVQLVQSGAEVKKPGASVKVSCKASGYRFTNYWIHWVRQAPGQGLEWIGGINPGN
NYATYRRKFQGRVTMTADTSTSTVYMELSSLRSEDTAVYYCTREGYGNYGAWFAH
WGQGTLVTVSS
>Light Chain of Inotuzumab IgG histidine scanning variant #1 (SEQ ID NO: 52)
DVQVTQSPSSLSASVGDRVTITCHSSQSLANSYGNTFLSWYLHKPGKAPQLLIYGISN
RFSGVPDRFSGSGSGTDFTLTISSLQPEDFATYYCLQGTHQPYTFGQGTKVEIK
>Light Chain of Inotuzumab IgG histidine scanning variant #2 (SEQ ID NO: 53)
DVQVTQSPSSLSASVGDRVTITCRHSQSLANSYGNTFLSWYLHKPGKAPQLLIYGISN
RFSGVPDRFSGSGSGTDFTLTISSLQPEDFATYYCLQGTHQPYTFGQGTKVEIK
>Light Chain of Inotuzumab IgG histidine scanning variant #3 (SEQ ID NO: 54)
DVQVTQSPSSLSASVGDRVTITCRSHQSLANSYGNTFLSWYLHKPGKAPQLLIYGISN
RFSGVPDRFSGSGSGTDFTLTISSLQPEDFATYYCLQGTHQPYTFGQGTKVEIK
>Light Chain of Inotuzumab IgG histidine scanning variant #4 (SEQ ID NO: 55)
DVQVTQSPSSLSASVGDRVTITCRSSHSLANSYGNTFLSWYLHKPGKAPQLLIYGISN
RFSGVPDRFSGSGSGTDFTLTISSLQPEDFATYYCLQGTHQPYTFGQGTKVEIK
>Light Chain of Inotuzumab IgG histidine scanning variant #5 (SEQ ID NO: 56)
DVQVTQSPSSLSASVGDRVTITCRSSQHLANSYGNTFLSWYLHKPGKAPQLLIYGISN
RFSGVPDRFSGSGSGTDFTLTISSLQPEDFATYYCLQGTHQPYTFGQGTKVEIK
>Light Chain of Inotuzumab IgG histidine scanning variant #6 (SEQ ID NO: 57)
DVQVTQSPSSLSASVGDRVTITCRSSQSHANSYGNTFLSWYLHKPGKAPQLLIYGISN
RFSGVPDRFSGSGSGTDFTLTISSLQPEDFATYYCLQGTHQPYTFGQGTKVEIK
>Light Chain of Inotuzumab IgG histidine scanning variant #7 (SEQ ID NO: 58)
DVQVTQSPSSLSASVGDRVTITCRSSQSLHNSYGNTFLSWYLHKPGKAPQLLIYGISN
RFSGVPDRFSGSGSGTDFTLTISSLQPEDFATYYCLQGTHQPYTFGQGTKVEIK
>Light Chain of Inotuzumab IgG histidine scanning variant #8 (SEQ ID NO: 59)
DVQVTQSPSSLSASVGDRVTITCRSSQSLAHSYGNTFLSWYLHKPGKAPQLLIYGISN
RFSGVPDRFSGSGSGTDFTLTISSLQPEDFATYYCLQGTHQPYTFGQGTKVEIK
>Light Chain of Inotuzumab IgG histidine scanning variant #9 (SEQ ID NO: 60)
DVQVTQSPSSLSASVGDRVTITCRSSQSLANHYGNTFLSWYLHKPGKAPQLLIYGISN
RFSGVPDRFSGSGSGTDFTLTISSLQPEDFATYYCLQGTHQPYTFGQGTKVEIK
>Light Chain of Inotuzumab IgG histidine scanning variant #10 (SEQ ID NO: 61)
DVQVTQSPSSLSASVGDRVTITCRSSQSLANSHGNTFLSWYLHKPGKAPQLLIYGISN
RFSGVPDRFSGSGSGTDFTLTISSLQPEDFATYYCLQGTHQPYTFGQGTKVEIK
>Light Chain of Inotuzumab IgG histidine scanning variant #11 (SEQ ID NO: 62)
DVQVTQSPSSLSASVGDRVTITCRSSQSLANSYHNTFLSWYLHKPGKAPQLLIYGISN
RFSGVPDRFSGSGSGTDFTLTISSLQPEDFATYYCLQGTHQPYTFGQGTKVEIK
>Light Chain of Inotuzumab IgG histidine scanning variant #12 (SEQ ID NO: 63)
DVQVTQSPSSLSASVGDRVTITCRSSQSLANSYGHTFLSWYLHKPGKAPQLLIYGISN
RFSGVPDRFSGSGSGTDFTLTISSLQPEDFATYYCLQGTHQPYTFGQGTKVEIK
>Light Chain of Inotuzumab IgG histidine scanning variant #13 (SEQ ID NO: 64)
DVQVTQSPSSLSASVGDRVTITCRSSQSLANSYGNHFLSWYLHKPGKAPQLLIYGISN
RFSGVPDRFSGSGSGTDFTLTISSLQPEDFATYYCLQGTHQPYTFGQGTKVEIK
>Light Chain of Inotuzumab IgG histidine scanning variant #14 (SEQ ID NO: 65)
DVQVTQSPSSLSASVGDRVTITCRSSQSLANSYGNTHLSWYLHKPGKAPQLLIYGISN
RFSGVPDRFSGSGSGTDFTLTISSLQPEDFATYYCLQGTHQPYTFGQGTKVEIK
>Light Chain of Inotuzumab IgG histidine scanning variant #15 (SEQ ID NO: 66)
DVQVTQSPSSLSASVGDRVTITCRSSQSLANSYGNTFHSWYLHKPGKAPQLLIYGISN
RFSGVPDRFSGSGSGTDFTLTISSLQPEDFATYYCLQGTHQPYTFGQGTKVEIK
>Light Chain of Inotuzumab IgG histidine scanning variant #16 (SEQ ID NO: 67)
DVQVTQSPSSLSASVGDRVTITCRSSQSLANSYGNTFLHWYLHKPGKAPQLLIYGISN
RFSGVPDRFSGSGSGTDFTLTISSLQPEDFATYYCLQGTHQPYTFGQGTKVEIK
>Light Chain of Inotuzumab IgG histidine scanning variant #17 (SEQ ID NO: 68)
DVQVTQSPSSLSASVGDRVTITCRSSQSLANSYGNTFLSWYLHKPGKAPQLLIYHISN
RFSGVPDRFSGSGSGTDFTLTISSLQPEDFATYYCLQGTHQPYTFGQGTKVEIK
>Light Chain of Inotuzumab IgG histidine scanning variant #18 (SEQ ID NO: 69)
DVQVTQSPSSLSASVGDRVTITCRSSQSLANSYGNTFLSWYLHKPGKAPQLLIYGHSN
RFSGVPDRFSGSGSGTDFTLTISSLQPEDFATYYCLQGTHQPYTFGQGTKVEIK
>Light Chain of Inotuzumab IgG histidine scanning variant #19 (SEQ ID NO: 70)
DVQVTQSPSSLSASVGDRVTITCRSSQSLANSYGNTFLSWYLHKPGKAPQLLIYGIHN
RFSGVPDRFSGSGSGTDFTLTISSLQPEDFATYYCLQGTHQPYTFGQGTKVEIK
>Light Chain of Inotuzumab IgG histidine scanning variant #20 (SEQ ID NO: 71)
DVQVTQSPSSLSASVGDRVTITCRSSQSLANSYGNTFLSWYLHKPGKAPQLLIYGISH
RFSGVPDRFSGSGSGTDFTLTISSLQPEDFATYYCLQGTHQPYTFGQGTKVEIK
>Light Chain of Inotuzumab IgG histidine scanning variant #21 (SEQ ID NO: 72)
DVQVTQSPSSLSASVGDRVTITCRSSQSLANSYGNTFLSWYLHKPGKAPQLLIYGISN
HFSGVPDRFSGSGSGTDFTLTISSLQPEDFATYYCLQGTHQPYTFGQGTKVEIK
>Light Chain of Inotuzumab IgG histidine scanning variant #22 (SEQ ID NO: 73)
DVQVTQSPSSLSASVGDRVTITCRSSQSLANSYGNTFLSWYLHKPGKAPQLLIYGISN
RHSGVPDRFSGSGSGTDFTLTISSLQPEDFATYYCLQGTHQPYTFGQGTKVEIK
>Light Chain of Inotuzumab IgG histidine scanning variant #23 (SEQ ID NO: 74)
DVQVTQSPSSLSASVGDRVTITCRSSQSLANSYGNTFLSWYLHKPGKAPQLLIYGISN
RFHGVPDRFSGSGSGTDFTLTISSLQPEDFATYYCLQGTHQPYTFGQGTKVEIK
>Light Chain of Inotuzumab IgG histidine scanning variant #24 (SEQ ID NO: 75)
DVQVTQSPSSLSASVGDRVTITCRSSQSLANSYGNTFLSWYLHKPGKAPQLLIYGISN
RFSGVPDRFSGSGSGTDFTLTISSLQPEDFATYYCHQGTHQPYTFGQGTKVEIK
>Light Chain of Inotuzumab IgG histidine scanning variant #25 (SEQ ID NO: 76)
DVQVTQSPSSLSASVGDRVTITCRSSQSLANSYGNTFLSWYLHKPGKAPQLLIYGISN
RFSGVPDRFSGSGSGTDFTLTISSLQPEDFATYYCLHGTHQPYTFGQGTKVEIK
>Light Chain of Inotuzumab IgG histidine scanning variant #26 (SEQ ID NO: 77)
DVQVTQSPSSLSASVGDRVTITCRSSQSLANSYGNTFLSWYLHKPGKAPQLLIYGISN
RFSGVPDRFSGSGSGTDFTLTISSLQPEDFATYYCLQHTHQPYTFGQGTKVEIK
>Light Chain of Inotuzumab IgG histidine scanning variant #27 (SEQ ID NO: 78)
DVQVTQSPSSLSASVGDRVTITCRSSQSLANSYGNTFLSWYLHKPGKAPQLLIYGISN
RFSGVPDRFSGSGSGTDFTLTISSLQPEDFATYYCLQGHHQPYTFGQGTKVEIK
>Light Chain of Inotuzumab IgG histidine scanning variant #28 (SEQ ID NO: 79)
DVQVTQSPSSLSASVGDRVTITCRSSQSLANSYGNTFLSWYLHKPGKAPQLLIYGISN
RFSGVPDRFSGSGSGTDFTLTISSLQPEDFATYYCLQGTAQPYTFGQGTKVEIK
>Light Chain of Inotuzumab IgG histidine scanning variant #29 (SEQ ID NO: 80)
DVQVTQSPSSLSASVGDRVTITCRSSQSLANSYGNTFLSWYLHKPGKAPQLLIYGISN
RFSGVPDRFSGSGSGTDFTLTISSLQPEDFATYYCLQGTHHPYTFGQGTKVEIK
>Light Chain of Inotuzumab IgG histidine scanning variant #30 (SEQ ID NO: 81)
DVQVTQSPSSLSASVGDRVTITCRSSQSLANSYGNTFLSWYLHKPGKAPQLLIYGISN
RFSGVPDRFSGSGSGTDFTLTISSLQPEDFATYYCLQGTHQHYTFGQGTKVEIK
>Light Chain of Inotuzumab IgG histidine scanning variant #31 (SEQ ID NO: 82)
DVQVTQSPSSLSASVGDRVTITCRSSQSLANSYGNTFLSWYLHKPGKAPQLLIYGISN
RFSGVPDRFSGSGSGTDFTLTISSLQPEDFATYYCLQGTHQPHTFGQGTKVEIK
>Light Chain of Inotuzumab IgG histidine scanning variant #32 (SEQ ID NO: 83)
DVQVTQSPSSLSASVGDRVTITCRSSQSLANSYGNTFLSWYLHKPGKAPQLLIYGISN
RFSGVPDRFSGSGSGTDFTLTISSLQPEDFATYYCLQGTHQPYHFGQGTKVEIK
>Heavy Chain Combinations of Inotuzumab IgG histidine scanning variant #1 (SEQ ID NO:
84)
EVQLVQSGAEVKKPGASVKVSCKASGYRFTHYWIHWVRQAPGQGLEWIGGHNPGN
NYATYRRKFQGRVTMTADTSTSTVYMELSSLRSEDTAVYYCTREGYGNYGAWFAY
WGQGTLVTVSS
>Heavy Chain Combinations of Inotuzumab IgG histidine scanning variant #2 (SEQ ID NO:
85)
EVQLVQSGAEVKKPGASVKVSCKASGYRFTHYWIHWVRQAPGQGLEWIGGINPGN
HYATYRRKFQGRVTMTADTSTSTVYMELSSLRSEDTAVYYCTREGYGNYGAWFAY
WGQGTLVTVSS
>Heavy Chain Combinations of Inotuzumab IgG histidine scanning variant #3 (SEQ ID NO:
86)
EVQLVQSGAEVKKPGASVKVSCKASGYRFTHYWIHWVRQAPGQGLEWIGGINPGN
NYAHYRRKFQGRVTMTADTSTSTVYMELSSLRSEDTAVYYCTREGYGNYGAWFAY
WGQGTLVTVSS
>Heavy Chain Combinations of Inotuzumab IgG histidine scanning variant #4 (SEQ ID NO:
87)
EVQLVQSGAEVKKPGASVKVSCKASGYRFTHYWIHWVRQAPGQGLEWIGGINPGN
NYATHRRKFQGRVTMTADTSTSTVYMELSSLRSEDTAVYYCTREGYGNYGAWFAY
WGQGTLVTVSS
>Heavy Chain Combinations of Inotuzumab IgG histidine scanning variant #5 (SEQ ID NO:
88)
EVQLVQSGAEVKKPGASVKVSCKASGYRFTNYWIHWVRQAPGQGLEWIGGHNPGN
HYATYRRKFQGRVTMTADTSTSTVYMELSSLRSEDTAVYYCTREGYGNYGAWFAY
WGQGTLVTVSS
>Heavy Chain Combinations of Inotuzumab IgG histidine scanning variant #6 (SEQ ID NO:
89)
EVQLVQSGAEVKKPGASVKVSCKASGYRFTNYWIHWVRQAPGQGLEWIGGHNPGN
NYAHYRRKFQGRVTMTADTSTSTVYMELSSLRSEDTAVYYCTREGYGNYGAWFAY
WGQGTLVTVSS
>Heavy Chain Combinations of Inotuzumab IgG histidine scanning variant #7 (SEQ ID NO:
90)
EVQLVQSGAEVKKPGASVKVSCKASGYRFTNYWIHWVRQAPGQGLEWIGGHNPGN
NYATHRRKFQGRVTMTADTSTSTVYMELSSLRSEDTAVYYCTREGYGNYGAWFAY
WGQGTLVTVSS
>Heavy Chain Combinations of Inotuzumab IgG histidine scanning variant #8 (SEQ ID NO:
91)
EVQLVQSGAEVKKPGASVKVSCKASGYRFTNYWIHWVRQAPGQGLEWIGGINPGN
HYAHYRRKFQGRVTMTADTSTSTVYMELSSLRSEDTAVYYCTREGYGNYGAWFAY
WGQGTLVTVSS
>Heavy Chain Combinations of Inotuzumab IgG histidine scanning variant #9 (SEQ ID NO:
92)
EVQLVQSGAEVKKPGASVKVSCKASGYRFTNYWIHWVRQAPGQGLEWIGGINPGN
HYATHRRKFQGRVTMTADTSTSTVYMELSSLRSEDTAVYYCTREGYGNYGAWFAY
WGQGTLVTVSS
>Heavy Chain Combinations of Inotuzumab IgG histidine scanning variant #10 (SEQ ID
NO: 93)
EVQLVQSGAEVKKPGASVKVSCKASGYRFTNYWIHWVRQAPGQGLEWIGGINPGN
NYAHHRRKFQGRVTMTADTSTSTVYMELSSLRSEDTAVYYCTREGYGNYGAWFAY
WGQGTLVTVSS
>Heavy Chain Combinations of Inotuzumab IgG histidine scanning variant #11 (SEQ ID
NO: 94)
EVQLVQSGAEVKKPGASVKVSCKASGYRFTHYWIHWVRQAPGQGLEWIGGHNPGN
HYATYRRKFQGRVTMTADTSTSTVYMELSSLRSEDTAVYYCTREGYGNYGAWFAY
WGQGTLVTVSS
>Heavy Chain Combinations of Inotuzumab IgG histidine scanning variant #12 (SEQ ID
NO: 95)
EVQLVQSGAEVKKPGASVKVSCKASGYRFTHYWIHWVRQAPGQGLEWIGGHNPGN
NYAHYRRKFQGRVTMTADTSTSTVYMELSSLRSEDTAVYYCTREGYGNYGAWFAY
WGQGTLVTVSS
>Heavy Chain Combinations of Inotuzumab IgG histidine scanning variant #13 (SEQ ID
NO: 96)
EVQLVQSGAEVKKPGASVKVSCKASGYRFTHYWIHWVRQAPGQGLEWIGGHNPGN
NYATHRRKFQGRVTMTADTSTSTVYMELSSLRSEDTAVYYCTREGYGNYGAWFAY
WGQGTLVTVSS
>Heavy Chain Combinations of Inotuzumab IgG histidine scanning variant #14 (SEQ ID
NO: 97)
EVQLVQSGAEVKKPGASVKVSCKASGYRFTHYWIHWVRQAPGQGLEWIGGINPGN
HYAHYRRKFQGRVTMTADTSTSTVYMELSSLRSEDTAVYYCTREGYGNYGAWFAY
WGQGTLVTVSS
>Heavy Chain Combinations of Inotuzumab IgG histidine scanning variant #15 (SEQ ID
NO: 98)
EVQLVQSGAEVKKPGASVKVSCKASGYRFTHYWIHWVRQAPGQGLEWIGGINPGN
HYATHRRKFQGRVTMTADTSTSTVYMELSSLRSEDTAVYYCTREGYGNYGAWFAY
WGQGTLVTVSS
>Heavy Chain Combinations of Inotuzumab IgG histidine scanning variant #16 (SEQ ID
NO: 99)
EVQLVQSGAEVKKPGASVKVSCKASGYRFTHYWIHWVRQAPGQGLEWIGGINPGN
NYAHHRRKFQGRVTMTADTSTSTVYMELSSLRSEDTAVYYCTREGYGNYGAWFAY
WGQGTLVTVSS
>Heavy Chain Combinations of Inotuzumab IgG histidine scanning variant #17 (SEQ ID
NO: 100)
EVQLVQSGAEVKKPGASVKVSCKASGYRFTNYWIHWVRQAPGQGLEWIGGHNPGN
HYAHYRRKFQGRVTMTADTSTSTVYMELSSLRSEDTAVYYCTREGYGNYGAWFAY
WGQGTLVTVSS
>Heavy Chain Combinations of Inotuzumab IgG histidine scanning variant #18 (SEQ ID
NO: 101)
EVQLVQSGAEVKKPGASVKVSCKASGYRFTNYWIHWVRQAPGQGLEWIGGHNPGN
HYATHRRKFQGRVTMTADTSTSTVYMELSSLRSEDTAVYYCTREGYGNYGAWFAY
WGQGTLVTVSS
>Heavy Chain Combinations of Inotuzumab IgG histidine scanning variant #19 (SEQ ID
NO: 102)
EVQLVQSGAEVKKPGASVKVSCKASGYRFTNYWIHWVRQAPGQGLEWIGGINPGN
HYAHHRRKFQGRVTMTADTSTSTVYMELSSLRSEDTAVYYCTREGYGNYGAWFAY
WGQGTLVTVSS
>Heavy Chain Combinations of Inotuzumab IgG histidine scanning variant #20 (SEQ ID
NO: 103)
EVQLVQSGAEVKKPGASVKVSCKASGYRFTNYWIHWVRQAPGQGLEWIGGHNPGN
NYAHHRRKFQGRVTMTADTSTSTVYMELSSLRSEDTAVYYCTREGYGNYGAWFAY
WGQGTLVTVSS
>Heavy Chain Combinations of Inotuzumab IgG histidine scanning variant #21 (SEQ ID
NO: 104)
EVQLVQSGAEVKKPGASVKVSCKASGYRFTHYWIHWVRQAPGQGLEWIGGIHPGN
NYATYRRKFQGRVTMTADTSTSTVYMELSSLRSEDTAVYYCTREGYGNYGAWFAY
WGQGTLVTVSS
>Heavy Chain Combinations of Inotuzumab IgG histidine scanning variant #22 (SEQ ID
NO: 105)
EVQLVQSGAEVKKPGASVKVSCKASGYRFTHYWIHWVRQAPGQGLEWIGGINPGN
NHATYRRKFQGRVTMTADTSTSTVYMELSSLRSEDTAVYYCTREGYGNYGAWFAY
WGQGTLVTVSS
>Heavy Chain Combinations of Inotuzumab IgG histidine scanning variant #23 (SEQ ID
NO: 106)
EVQLVQSGAEVKKPGASVKVSCKASGYRFTHYWIHWVRQAPGQGLEWIGGINPGN
NYAHYRRKFQGRVTMTADTSTSTVYMELSSLRSEDTAVYYCTREGYGNYGAWFAY
WGQGTLVTVSS
>Heavy Chain Combinations of Inotuzumab IgG histidine scanning variant #24 (SEQ ID
NO: 107)
EVQLVQSGAEVKKPGASVKVSCKASGYRFTHYWIHWVRQAPGQGLEWIGGINPGN
NYATYRRHFQGRVTMTADTSTSTVYMELSSLRSEDTAVYYCTREGYGNYGAWFAY
WGQGTLVTVSS
>Heavy Chain Combinations of Inotuzumab IgG histidine scanning variant #25 (SEQ ID
NO: 108)
EVQLVQSGAEVKKPGASVKVSCKASGYRFTHYWIHWVRQAPGQGLEWIGGINPGN
NYATYRRKFQGRVTMTADTSTSTVYMELSSLRSEDTAVYYCTREGYGHYGAWFAY
WGQGTLVTVSS
>Heavy Chain Combinations of Inotuzumab IgG histidine scanning variant #26 (SEQ ID
NO: 109)
EVQLVQSGAEVKKPGASVKVSCKASGYRFTNYWIHWVRQAPGQGLEWIGGIHPGN
NHATYRRKFQGRVTMTADTSTSTVYMELSSLRSEDTAVYYCTREGYGNYGAWFAY
WGQGTLVTVSS
>Heavy Chain Combinations of Inotuzumab IgG histidine scanning variant #27 (SEQ ID
NO: 110)
EVQLVQSGAEVKKPGASVKVSCKASGYRFTNYWIHWVRQAPGQGLEWIGGIHPGN
NYAHYRRKFQGRVTMTADTSTSTVYMELSSLRSEDTAVYYCTREGYGNYGAWFAY
WGQGTLVTVSS
>Heavy Chain Combinations of Inotuzumab IgG histidine scanning variant #28 (SEQ ID
NO: 111)
EVQLVQSGAEVKKPGASVKVSCKASGYRFTNYWIHWVRQAPGQGLEWIGGIHPGN
NYATYRRHFQGRVTMTADTSTSTVYMELSSLRSEDTAVYYCTREGYGNYGAWFAY
WGQGTLVTVSS
>Heavy Chain Combinations of Inotuzumab IgG histidine scanning variant #29 (SEQ ID
NO: 112)
EVQLVQSGAEVKKPGASVKVSCKASGYRFTNYWIHWVRQAPGQGLEWIGGIHPGN
NYATYRRKFQGRVTMTADTSTSTVYMELSSLRSEDTAVYYCTREGYGHYGAWFAY
WGQGTLVTVSS
>Heavy Chain Combinations of Inotuzumab IgG histidine scanning variant #30 (SEQ ID
NO: 113)
EVQLVQSGAEVKKPGASVKVSCKASGYRFTNYWIHWVRQAPGQGLEWIGGINPGN
NHAHYRRKFQGRVTMTADTSTSTVYMELSSLRSEDTAVYYCTREGYGNYGAWFAY
WGQGTLVTVSS
>Heavy Chain Combinations of Inotuzumab IgG histidine scanning variant #31 (SEQ ID
NO: 114)
EVQLVQSGAEVKKPGASVKVSCKASGYRFTNYWIHWVRQAPGQGLEWIGGINPGN
NHATYRRHFQGRVTMTADTSTSTVYMELSSLRSEDTAVYYCTREGYGNYGAWFAY
WGQGTLVTVSS
>Heavy Chain Combinations of Inotuzumab IgG histidine scanning variant #32 (SEQ ID
NO: 115)
EVQLVQSGAEVKKPGASVKVSCKASGYRFTNYWIHWVRQAPGQGLEWIGGINPGN
NHATYRRKFQGRVTMTADTSTSTVYMELSSLRSEDTAVYYCTREGYGHYGAWFAY
WGQGTLVTVSS
>Heavy Chain Combinations of Inotuzumab IgG histidine scanning variant #33 (SEQ ID
NO: 116)
EVQLVQSGAEVKKPGASVKVSCKASGYRFTNYWIHWVRQAPGQGLEWIGGINPGN
NYAHYRRHFQGRVTMTADTSTSTVYMELSSLRSEDTAVYYCTREGYGNYGAWFAY
WGQGTLVTVSS
>Heavy Chain Combinations of Inotuzumab IgG histidine scanning variant #34 (SEQ ID
NO: 117)
EVQLVQSGAEVKKPGASVKVSCKASGYRFTNYWIHWVRQAPGQGLEWIGGINPGN
NYAHYRRKFQGRVTMTADTSTSTVYMELSSLRSEDTAVYYCTREGYGHYGAWFAY
WGQGTLVTVSS
>Heavy Chain Combinations of Inotuzumab IgG histidine scanning variant #35 (SEQ ID
NO: 118)
EVQLVQSGAEVKKPGASVKVSCKASGYRFTNYWIHWVRQAPGQGLEWIGGINPGN
NYATYRRHFQGRVTMTADTSTSTVYMELSSLRSEDTAVYYCTREGYGHYGAWFAY
WGQGTLVTVSS
>Heavy Chain Combinations of Inotuzumab IgG histidine scanning variant #36 (SEQ ID
NO: 119)
EVQLVQSGAEVKKPGASVKVSCKASGYRFTHYWIHWVRQAPGQGLEWIGGIHPGN
NHATYRRKFQGRVTMTADTSTSTVYMELSSLRSEDTAVYYCTREGYGNYGAWFAY
WGQGTLVTVSS
>Heavy Chain Combinations of Inotuzumab IgG histidine scanning variant #37 (SEQ ID
NO: 120)
EVQLVQSGAEVKKPGASVKVSCKASGYRFTHYWIHWVRQAPGQGLEWIGGIHPGN
NYAHYRRKFQGRVTMTADTSTSTVYMELSSLRSEDTAVYYCTREGYGNYGAWFAY
WGQGTLVTVSS
>Heavy Chain Combinations of Inotuzumab IgG histidine scanning variant #38 (SEQ ID
NO: 121)
EVQLVQSGAEVKKPGASVKVSCKASGYRFTHYWIHWVRQAPGQGLEWIGGIHPGN
NYATYRRHFQGRVTMTADTSTSTVYMELSSLRSEDTAVYYCTREGYGNYGAWFAY
WGQGTLVTVSS
>Heavy Chain Combinations of Inotuzumab IgG histidine scanning variant #39 (SEQ ID
NO: 122)
EVQLVQSGAEVKKPGASVKVSCKASGYRFTHYWIHWVRQAPGQGLEWIGGIHPGN
NYATYRRKFQGRVTMTADTSTSTVYMELSSLRSEDTAVYYCTREGYGHYGAWFAY
WGQGTLVTVSS
>Heavy Chain Combinations of Inotuzumab IgG histidine scanning variant #40 (SEQ ID
NO: 123)
EVQLVQSGAEVKKPGASVKVSCKASGYRFTHYWIHWVRQAPGQGLEWIGGINPGN
NHAHYRRKFQGRVTMTADTSTSTVYMELSSLRSEDTAVYYCTREGYGNYGAWFAY
WGQGTLVTVSS
>Heavy Chain Combinations of Inotuzumab IgG histidine scanning variant #41 (SEQ ID
NO: 124)
EVQLVQSGAEVKKPGASVKVSCKASGYRFTHYWIHWVRQAPGQGLEWIGGINPGN
NHATYRRHFQGRVTMTADTSTSTVYMELSSLRSEDTAVYYCTREGYGNYGAWFAY
WGQGTLVTVSS
>Heavy Chain Combinations of Inotuzumab IgG histidine scanning variant #42 (SEQ ID
NO: 125)
EVQLVQSGAEVKKPGASVKVSCKASGYRFTHYWIHWVRQAPGQGLEWIGGINPGN
NHATYRRKFQGRVTMTADTSTSTVYMELSSLRSEDTAVYYCTREGYGHYGAWFAY
WGQGTLVTVSS
>Heavy Chain Combinations of Inotuzumab IgG histidine scanning variant #43 (SEQ ID
NO: 126)
EVQLVQSGAEVKKPGASVKVSCKASGYRFTHYWIHWVRQAPGQGLEWIGGINPGN
NYAHYRRHFQGRVTMTADTSTSTVYMELSSLRSEDTAVYYCTREGYGNYGAWFAY
WGQGTLVTVSS
>Heavy Chain Combinations of Inotuzumab IgG histidine scanning variant #44 (SEQ ID
NO: 127)
EVQLVQSGAEVKKPGASVKVSCKASGYRFTHYWIHWVRQAPGQGLEWIGGINPGN
NYAHYRRKFQGRVTMTADTSTSTVYMELSSLRSEDTAVYYCTREGYGHYGAWFAY
WGQGTLVTVSS
>Heavy Chain Combinations of Inotuzumab IgG histidine scanning variant #45 (SEQ ID
NO: 128)
EVQLVQSGAEVKKPGASVKVSCKASGYRFTHYWIHWVRQAPGQGLEWIGGINPGN
NYATYRRHFQGRVTMTADTSTSTVYMELSSLRSEDTAVYYCTREGYGHYGAWFAY
WGQGTLVTVSS
>Heavy Chain Combinations of Inotuzumab IgG histidine scanning variant #46 (SEQ ID
NO: 129)
EVQLVQSGAEVKKPGASVKVSCKASGYRFTNYWIHWVRQAPGQGLEWIGGIHPGN
NHAHYRRKFQGRVTMTADTSTSTVYMELSSLRSEDTAVYYCTREGYGNYGAWFAY
WGQGTLVTVSS
>Heavy Chain Combinations of Inotuzumab IgG histidine scanning variant #47 (SEQ ID
NO: 130)
EVQLVQSGAEVKKPGASVKVSCKASGYRFTNYWIHWVRQAPGQGLEWIGGIHPGN
NHATYRRHFQGRVTMTADTSTSTVYMELSSLRSEDTAVYYCTREGYGNYGAWFAY
WGQGTLVTVSS
>Heavy Chain Combinations of Inotuzumab IgG histidine scanning variant #48 (SEQ ID
NO: 131)
EVQLVQSGAEVKKPGASVKVSCKASGYRFTNYWIHWVRQAPGQGLEWIGGIHPGN
NHATYRRKFQGRVTMTADTSTSTVYMELSSLRSEDTAVYYCTREGYGHYGAWFAY
WGQGTLVTVSS
>Heavy Chain Combinations of Inotuzumab IgG histidine scanning variant #49 (SEQ ID
NO: 132)
EVQLVQSGAEVKKPGASVKVSCKASGYRFTNYWIHWVRQAPGQGLEWIGGIHPGN
NYAHYRRHFQGRVTMTADTSTSTVYMELSSLRSEDTAVYYCTREGYGNYGAWFAY
WGQGTLVTVSS
>Heavy Chain Combinations of Inotuzumab IgG histidine scanning variant #50 (SEQ ID
NO: 133)
EVQLVQSGAEVKKPGASVKVSCKASGYRFTNYWIHWVRQAPGQGLEWIGGIHPGN
NYAHYRRKFQGRVTMTADTSTSTVYMELSSLRSEDTAVYYCTREGYGHYGAWFAY
WGQGTLVTVSS
>Heavy Chain Combinations of Inotuzumab IgG histidine scanning variant #51 (SEQ ID
NO: 134)
EVQLVQSGAEVKKPGASVKVSCKASGYRFTNYWIHWVRQAPGQGLEWIGGIHPGN
NYATYRRHFQGRVTMTADTSTSTVYMELSSLRSEDTAVYYCTREGYGHYGAWFAY
WGQGTLVTVSS
>Heavy Chain Combinations of Inotuzumab IgG histidine scanning variant #52 (SEQ ID
NO: 135)
EVQLVQSGAEVKKPGASVKVSCKASGYRFTNYWIHWVRQAPGQGLEWIGGINPGN
NHAHYRRHFQGRVTMTADTSTSTVYMELSSLRSEDTAVYYCTREGYGNYGAWFAY
WGQGTLVTVSS
>Heavy Chain Combinations of Inotuzumab IgG histidine scanning variant #53 (SEQ ID
NO: 136)
EVQLVQSGAEVKKPGASVKVSCKASGYRFTNYWIHWVRQAPGQGLEWIGGINPGN
NHAHYRRKFQGRVTMTADTSTSTVYMELSSLRSEDTAVYYCTREGYGHYGAWFAY
WGQGTLVTVSS
>Heavy Chain Combinations of Inotuzumab IgG histidine scanning variant #54 (SEQ ID
NO: 137)
EVQLVQSGAEVKKPGASVKVSCKASGYRFTNYWIHWVRQAPGQGLEWIGGINPGN
NHATYRRHFQGRVTMTADTSTSTVYMELSSLRSEDTAVYYCTREGYGHYGAWFAY
WGQGTLVTVSS
>Heavy Chain Combinations of Inotuzumab IgG histidine scanning variant #55 (SEQ ID
NO: 138)
EVQLVQSGAEVKKPGASVKVSCKASGYRFTNYWIHWVRQAPGQGLEWIGGINPGN
NYAHYRRHFQGRVTMTADTSTSTVYMELSSLRSEDTAVYYCTREGYGHYGAWFAY
WGQGTLVTVSS
>Light Chain Combinations of Inotuzumab IgG histidine scanning variant #1 (SEQ ID NO:
139)
DVQVTQSPSSLSASVGDRVTITCRSSQSLHNSHGNTFLSWYLHKPGKAPQLLIYGISN
RFSGVPDRFSGSGSGTDFTLTISSLQPEDFATYYCLQGTHQPYTFGQGTKVEIK
>Light Chain Combinations of Inotuzumab IgG histidine scanning variant #2 (SEQ ID NO:
140)
DVQVTQSPSSLSASVGDRVTITCRSSQSLHNSYGHTFLSWYLHKPGKAPQLLIYGISN
RFSGVPDRFSGSGSGTDFTLTISSLQPEDFATYYCLQGTHQPYTFGQGTKVEIK
>Light Chain Combinations of Inotuzumab IgG histidine scanning variant #3 (SEQ ID NO:
141)
DVQVTQSPSSLSASVGDRVTITCRSSQSLANSHGHTFLSWYLHKPGKAPQLLIYGISN
RFSGVPDRFSGSGSGTDFTLTISSLQPEDFATYYCLQGTHQPYTFGQGTKVEIK
>Light Chain Combinations of Inotuzumab IgG histidine scanning variant #4 (SEQ ID NO:
142)
DVQVTQSPSSLSASVGDRVTITCRSSQSLHNSHGHTFLSWYLHKPGKAPQLLIYGISN
RFSGVPDRFSGSGSGTDFTLTISSLQPEDFATYYCLQGTHQPYTFGQGTKVEIK
>Heavy Chain of Pinatuzumab IgG (SEQ ID NO: 143)
EVQLVESGGGLVQPGGSLRLSCAASGYEFSRSWMNWVRQAPGKGLEWVGRIYPGD
GDTNYSGKFKGRFTISADTSKNTAYLQMNSLRAEDTAVYYCARDGSSWDWYFDVW
GQGTLVTVSS
>Light Chain of Pinatuzumab IgG (SEQ ID NO: 144)
DIQMTQSPSSLSASVGDRVTITCRSSQSIVHSVGNTFLEWYQQKPGKAPKLLIYKVSN
RFSGVPSRFSGSGSGTDFTLTISSLQPEDFATYYCFQGSQFPYTFGQGTKVEIK
>Heavy Chain CDR1 of Pinatuzumab (SEQ ID NO: 145)
GYEFSRSWMN
>Heavy Chain CDR2 of Pinatuzumab (SEQ ID NO: 146)
RIYPGDGDTNYSGKFKG
>Heavy Chain CDR3 of Pinatuzumab (SEQ ID NO: 147)
ARDGSSWDWYFDV
>Light Chain CDR1 of Pinatuzumab (SEQ ID NO: 148)
RSSQSIVHSVGNTFLE
>Light Chain CDR2 of Pinatuzumab (SEQ ID NO: 149)
KVSNRFS
>Light Chain CDR3 of Pinatuzumab (SEQ ID NO: 150)
FQGSQFPY
>Heavy Chain of Pinatuzumab IgG histidine scanning variant #1 (SEQ ID NO: 151)
EVQLVESGGGLVQPGGSLRLSCAASHYEFSRSWMNWVRQAPGKGLEWVGRIYPGD
GDTNYSGKFKGRFTISADTSKNTAYLQMNSLRAEDTAVYYCARDGSSWDWYFDVW
GQGTLVTVSS
>Heavy Chain of Pinatuzumab IgG histidine scanning variant #2 (SEQ ID NO: 152)
EVQLVESGGGLVQPGGSLRLSCAASGHEFSRSWMNWVRQAPGKGLEWVGRIYPGD
GDTNYSGKFKGRFTISADTSKNTAYLQMNSLRAEDTAVYYCARDGSSWDWYFDVW
GQGTLVTVSS
>Heavy Chain of Pinatuzumab IgG histidine scanning variant #3 (SEQ ID NO: 153)
EVQLVESGGGLVQPGGSLRLSCAASGYHFSRSWMNWVRQAPGKGLEWVGRIYPGD
GDTNYSGKFKGRFTISADTSKNTAYLQMNSLRAEDTAVYYCARDGSSWDWYFDVW
GQGTLVTVSS
>Heavy Chain of Pinatuzumab IgG histidine scanning variant #4 (SEQ ID NO: 154)
EVQLVESGGGLVQPGGSLRLSCAASGYEHSRSWMNWVRQAPGKGLEWVGRIYPGD
GDTNYSGKFKGRFTISADTSKNTAYLQMNSLRAEDTAVYYCARDGSSWDWYFDVW
GQGTLVTVSS
>Heavy Chain of Pinatuzumab IgG histidine scanning variant #5 (SEQ ID NO: 155)
EVQLVESGGGLVQPGGSLRLSCAASGYEFHRSWMNWVRQAPGKGLEWVGRIYPGD
GDTNYSGKFKGRFTISADTSKNTAYLQMNSLRAEDTAVYYCARDGSSWDWYFDVW
GQGTLVTVSS
>Heavy Chain of Pinatuzumab IgG histidine scanning variant #6 (SEQ ID NO: 156)
EVQLVESGGGLVQPGGSLRLSCAASGYEFSHSWMNWVRQAPGKGLEWVGRIYPGD
GDTNYSGKFKGRFTISADTSKNTAYLQMNSLRAEDTAVYYCARDGSSWDWYFDVW
GQGTLVTVSS
>Heavy Chain of Pinatuzumab IgG histidine scanning variant #7 (SEQ ID NO: 157)
EVQLVESGGGLVQPGGSLRLSCAASGYEFSRHWMNWVRQAPGKGLEWVGRIYPGD
GDTNYSGKFKGRFTISADTSKNTAYLQMNSLRAEDTAVYYCARDGSSWDWYFDVW
GQGTLVTVSS
>Heavy Chain of Pinatuzumab IgG histidine scanning variant #8 (SEQ ID NO: 158)
EVQLVESGGGLVQPGGSLRLSCAASGYEFSRSHMNWVRQAPGKGLEWVGRIYPGD
GDTNYSGKFKGRFTISADTSKNTAYLQMNSLRAEDTAVYYCARDGSSWDWYFDVW
GQGTLVTVSS
>Heavy Chain of Pinatuzumab IgG histidine scanning variant #9 (SEQ ID NO: 159)
EVQLVESGGGLVQPGGSLRLSCAASGYEFSRSWHNWVRQAPGKGLEWVGRIYPGD
GDTNYSGKFKGRFTISADTSKNTAYLQMNSLRAEDTAVYYCARDGSSWDWYFDVW
GQGTLVTVSS
>Heavy Chain of Pinatuzumab IgG histidine scanning variant #10 (SEQ ID NO: 160)
EVQLVESGGGLVQPGGSLRLSCAASGYEFSRSWMHWVRQAPGKGLEWVGRIYPGD
GDTNYSGKFKGRFTISADTSKNTAYLQMNSLRAEDTAVYYCARDGSSWDWYFDVW
GQGTLVTVSS
>Heavy Chain of Pinatuzumab IgG histidine scanning variant #11 (SEQ ID NO: 161)
EVQLVESGGGLVQPGGSLRLSCAASGYEFSRSWMNWVRQAPGKGLEWVGHTYPGD
GDTNYSGKFKGRFTISADTSKNTAYLQMNSLRAEDTAVYYCARDGSSWDWYFDVW
GQGTLVTVSS
>Heavy Chain of Pinatuzumab IgG histidine scanning variant #12 (SEQ ID NO: 162)
EVQLVESGGGLVQPGGSLRLSCAASGYEFSRSWMNWVRQAPGKGLEWVGRHYPG
DGDTNYSGKFKGRFTISADTSKNTAYLQMNSLRAEDTAVYYCARDGSSWDWYFDV
WGQGTLVTVSS
>Heavy Chain of Pinatuzumab IgG histidine scanning variant #13 (SEQ ID NO: 163)
EVQLVESGGGLVQPGGSLRLSCAASGYEFSRSWMNWVRQAPGKGLEWVGRIHPGD
GDTNYSGKFKGRFTISADTSKNTAYLQMNSLRAEDTAVYYCARDGSSWDWYFDVW
GQGTLVTVSS
>Heavy Chain of Pinatuzumab IgG histidine scanning variant #14 (SEQ ID NO: 164)
EVQLVESGGGLVQPGGSLRLSCAASGYEFSRSWMNWVRQAPGKGLEWVGRIYHGD
GDTNYSGKFKGRFTISADTSKNTAYLQMNSLRAEDTAVYYCARDGSSWDWYFDVW
GQGTLVTVSS
>Heavy Chain of Pinatuzumab IgG histidine scanning variant #15 (SEQ ID NO: 165)
EVQLVESGGGLVQPGGSLRLSCAASGYEFSRSWMNWVRQAPGKGLEWVGRIYPHD
GDTNYSGKFKGRFTISADTSKNTAYLQMNSLRAEDTAVYYCARDGSSWDWYFDVW
GQGTLVTVSS
>Heavy Chain of Pinatuzumab IgG histidine scanning variant #16 (SEQ ID NO: 166)
EVQLVESGGGLVQPGGSLRLSCAASGYEFSRSWMNWVRQAPGKGLEWVGRIYPGH
GDTNYSGKFKGRFTISADTSKNTAYLQMNSLRAEDTAVYYCARDGSSWDWYFDVW
GQGTLVTVSS
>Heavy Chain of Pinatuzumab IgG histidine scanning variant #17 (SEQ ID NO: 167)
EVQLVESGGGLVQPGGSLRLSCAASGYEFSRSWMNWVRQAPGKGLEWVGRIYPGD
HDTNYSGKFKGRFTISADTSKNTAYLQMNSLRAEDTAVYYCARDGSSWDWYFDVW
GQGTLVTVSS
>Heavy Chain of Pinatuzumab IgG histidine scanning variant #18 (SEQ ID NO: 168)
EVQLVESGGGLVQPGGSLRLSCAASGYEFSRSWMNWVRQAPGKGLEWVGRIYPGD
GHTNYSGKFKGRFTISADTSKNTAYLQMNSLRAEDTAVYYCARDGSSWDWYFDVW
GQGTLVTVSS
>Heavy Chain of Pinatuzumab IgG histidine scanning variant #19 (SEQ ID NO: 169)
EVQLVESGGGLVQPGGSLRLSCAASGYEFSRSWMNWVRQAPGKGLEWVGRIYPGD
GDHNYSGKFKGRFTISADTSKNTAYLQMNSLRAEDTAVYYCARDGSSWDWYFDV
WGQGTLVTVSS
>Heavy Chain of Pinatuzumab IgG histidine scanning variant #20 (SEQ ID NO: 170)
EVQLVESGGGLVQPGGSLRLSCAASGYEFSRSWMNWVRQAPGKGLEWVGRIYPGD
GDTHYSGKFKGRFTISADTSKNTAYLQMNSLRAEDTAVYYCARDGSSWDWYFDVW
GQGTLVTVSS
>Heavy Chain of Pinatuzumab IgG histidine scanning variant #21 (SEQ ID NO: 171)
EVQLVESGGGLVQPGGSLRLSCAASGYEFSRSWMNWVRQAPGKGLEWVGRIYPGD
GDTNHSGKFKGRFTISADTSKNTAYLQMNSLRAEDTAVYYCARDGSSWDWYFDVW
GQGTLVTVSS
>Heavy Chain of Pinatuzumab IgG histidine scanning variant #22 (SEQ ID NO: 172)
EVQLVESGGGLVQPGGSLRLSCAASGYEFSRSWMNWVRQAPGKGLEWVGRIYPGD
GDTNYHGKFKGRFTISADTSKNTAYLQMNSLRAEDTAVYYCARDGSSWDWYFDV
WGQGTLVTVSS
>Heavy Chain of Pinatuzumab IgG histidine scanning variant #23 (SEQ ID NO: 173)
EVQLVESGGGLVQPGGSLRLSCAASGYEFSRSWMNWVRQAPGKGLEWVGRIYPGD
GDTNYSHKFKGRFTISADTSKNTAYLQMNSLRAEDTAVYYCARDGSSWDWYFDVW
GQGTLVTVSS
>Heavy Chain of Pinatuzumab IgG histidine scanning variant #24 (SEQ ID NO: 174)
EVQLVESGGGLVQPGGSLRLSCAASGYEFSRSWMNWVRQAPGKGLEWVGRIYPGD
GDTNYSGHFKGRFTISADTSKNTAYLQMNSLRAEDTAVYYCARDGSSWDWYFDVW
GQGTLVTVSS
>Heavy Chain of Pinatuzumab IgG histidine scanning variant #25 (SEQ ID NO: 175)
EVQLVESGGGLVQPGGSLRLSCAASGYEFSRSWMNWVRQAPGKGLEWVGRIYPGD
GDTNYSGKHKGRFTISADTSKNTAYLQMNSLRAEDTAVYYCARDGSSWDWYFDV
WGQGTLVTVSS
>Heavy Chain of Pinatuzumab IgG histidine scanning variant #26 (SEQ ID NO: 176)
EVQLVESGGGLVQPGGSLRLSCAASGYEFSRSWMNWVRQAPGKGLEWVGRIYPGD
GDTNYSGKFHGRFTISADTSKNTAYLQMNSLRAEDTAVYYCARDGSSWDWYFDVW
GQGTLVTVSS
>Heavy Chain of Pinatuzumab IgG histidine scanning variant #27 (SEQ ID NO: 177)
EVQLVESGGGLVQPGGSLRLSCAASGYEFSRSWMNWVRQAPGKGLEWVGRIYPGD
GDTNYSGKFKHRFTISADTSKNTAYLQMNSLRAEDTAVYYCARDGSSWDWYFDVW
GQGTLVTVSS
>Heavy Chain of Pinatuzumab IgG histidine scanning variant #28 (SEQ ID NO: 178)
EVQLVESGGGLVQPGGSLRLSCAASGYEFSRSWMNWVRQAPGKGLEWVGRIYPGD
GDTNYSGKFKGRFTISADTSKNTAYLQMNSLRAEDTAVYYCHRDGSSWDWYFDVW
GQGTLVTVSS
>Heavy Chain of Pinatuzumab IgG histidine scanning variant #29 (SEQ ID NO: 179)
EVQLVESGGGLVQPGGSLRLSCAASGYEFSRSWMNWVRQAPGKGLEWVGRIYPGD
GDTNYSGKFKGRFTISADTSKNTAYLQMNSLRAEDTAVYYCAHDGSSWDWYFDV
WGQGTLVTVSS
>Heavy Chain of Pinatuzumab IgG histidine scanning variant #30 (SEQ ID NO: 180)
EVQLVESGGGLVQPGGSLRLSCAASGYEFSRSWMNWVRQAPGKGLEWVGRIYPGD
GDTNYSGKFKGRFTISADTSKNTAYLQMNSLRAEDTAVYYCARHGSSWDWYFDVW
GQGTLVTVSS
>Heavy Chain of Pinatuzumab IgG histidine scanning variant #31 (SEQ ID NO: 181)
EVQLVESGGGLVQPGGSLRLSCAASGYEFSRSWMNWVRQAPGKGLEWVGRIYPGD
GDTNYSGKFKGRFTISADTSKNTAYLQMNSLRAEDTAVYYCARDHSSWDWYFDVW
GQGTLVTVSS
>Heavy Chain of Pinatuzumab IgG histidine scanning variant #32 (SEQ ID NO: 182)
EVQLVESGGGLVQPGGSLRLSCAASGYEFSRSWMNWVRQAPGKGLEWVGRIYPGD
GDTNYSGKFKGRFTISADTSKNTAYLQMNSLRAEDTAVYYCARDGHSWDWYFDV
WGQGTLVTVSS
>Heavy Chain of Pinatuzumab IgG histidine scanning variant #33 (SEQ ID NO: 183)
EVQLVESGGGLVQPGGSLRLSCAASGYEFSRSWMNWVRQAPGKGLEWVGRIYPGD
GDTNYSGKFKGRFTISADTSKNTAYLQMNSLRAEDTAVYYCARDGSHWDWYFDV
WGQGTLVTVSS
>Heavy Chain of Pinatuzumab IgG histidine scanning variant #34 (SEQ ID NO: 184)
EVQLVESGGGLVQPGGSLRLSCAASGYEFSRSWMNWVRQAPGKGLEWVGRIYPGD
GDTNYSGKFKGRFTISADTSKNTAYLQMNSLRAEDTAVYYCARDGSSHDWYFDVW
GQGTLVTVSS
>Heavy Chain of Pinatuzumab IgG histidine scanning variant #35 (SEQ ID NO: 185)
EVQLVESGGGLVQPGGSLRLSCAASGYEFSRSWMNWVRQAPGKGLEWVGRIYPGD
GDTNYSGKFKGRFTISADTSKNTAYLQMNSLRAEDTAVYYCARDGSSWHWYFDVW
GQGTLVTVSS
>Heavy Chain of Pinatuzumab IgG histidine scanning variant #36 (SEQ ID NO: 186)
EVQLVESGGGLVQPGGSLRLSCAASGYEFSRSWMNWVRQAPGKGLEWVGRIYPGD
GDTNYSGKFKGRFTISADTSKNTAYLQMNSLRAEDTAVYYCARDGSSWDHYFDVW
GQGTLVTVSS
>Heavy Chain of Pinatuzumab IgG histidine scanning variant #37 (SEQ ID NO: 187)
EVQLVESGGGLVQPGGSLRLSCAASGYEFSRSWMNWVRQAPGKGLEWVGRIYPGD
GDTNYSGKFKGRFTISADTSKNTAYLQMNSLRAEDTAVYYCARDGSSWDWHFDVW
GQGTLVTVSS
>Heavy Chain of Pinatuzumab IgG histidine scanning variant #38 (SEQ ID NO: 188)
EVQLVESGGGLVQPGGSLRLSCAASGYEFSRSWMNWVRQAPGKGLEWVGRIYPGD
GDTNYSGKFKGRFTISADTSKNTAYLQMNSLRAEDTAVYYCARDGSSWDWYHDV
WGQGTLVTVSS
>Heavy Chain of Pinatuzumab IgG histidine scanning variant #39 (SEQ ID NO: 189)
EVQLVESGGGLVQPGGSLRLSCAASGYEFSRSWMNWVRQAPGKGLEWVGRIYPGD
GDTNYSGKFKGRFTISADTSKNTAYLQMNSLRAEDTAVYYCARDGSSWDWYFHVW
GQGTLVTVSS
>Heavy Chain of Pinatuzumab IgG histidine scanning variant #40 (SEQ ID NO: 190)
EVQLVESGGGLVQPGGSLRLSCAASGYEFSRSWMNWVRQAPGKGLEWVGRIYPGD
GDTNYSGKFKGRFTISADTSKNTAYLQMNSLRAEDTAVYYCARDGSSWDWYFDHW
GQGTLVTVSS
>Light Chain of Pinatuzumab IgG histidine scanning variant #1 (SEQ ID NO: 191)
DIQMTQSPSSLSASVGDRVTITCHSSQSIVHSVGNTFLEWYQQKPGKAPKLLIYKVSN
RFSGVPSRFSGSGSGTDFTLTISSLQPEDFATYYCFQGSQFPYTFGQGTKVEIK
>Light Chain of Pinatuzumab IgG histidine scanning variant #2 (SEQ ID NO: 192)
DIQMTQSPSSLSASVGDRVTITCRHSQSIVHSVGNTFLEWYQQKPGKAPKLLIYKVSN
RFSGVPSRFSGSGSGTDFTLTISSLQPEDFATYYCFQGSQFPYTFGQGTKVEIK
>Light Chain of Pinatuzumab IgG histidine scanning variant #3 (SEQ ID NO: 193)
DIQMTQSPSSLSASVGDRVTITCRSHQSIVHSVGNTFLEWYQQKPGKAPKLLIYKVSN
RFSGVPSRFSGSGSGTDFTLTISSLQPEDFATYYCFQGSQFPYTFGQGTKVEIK
>Light Chain of Pinatuzumab IgG histidine scanning variant #4 (SEQ ID NO: 194)
DIQMTQSPSSLSASVGDRVTITCRSSHSIVHSVGNTFLEWYQQKPGKAPKLLIYKVSN
RFSGVPSRFSGSGSGTDFTLTISSLQPEDFATYYCFQGSQFPYTFGQGTKVEIK
>Light Chain of Pinatuzumab IgG histidine scanning variant #5 (SEQ ID NO: 195)
DIQMTQSPSSLSASVGDRVTITCRSSQHIVHSVGNTFLEWYQQKPGKAPKLLIYKVSN
RFSGVPSRFSGSGSGTDFTLTISSLQPEDFATYYCFQGSQFPYTFGQGTKVEIK
>Light Chain of Pinatuzumab IgG histidine scanning variant #6 (SEQ ID NO: 196)
DIQMTQSPSSLSASVGDRVTITCRSSQSHVHSVGNTFLEWYQQKPGKAPKLLIYKVS
NRFSGVPSRFSGSGSGTDFTLTISSLQPEDFATYYCFQGSQFPYTFGQGTKVEIK
>Light Chain of Pinatuzumab IgG histidine scanning variant #7 (SEQ ID NO: 197)
DIQMTQSPSSLSASVGDRVTITCRSSQSIHHSVGNTFLEWYQQKPGKAPKLLIYKVSN
RFSGVPSRFSGSGSGTDFTLTISSLQPEDFATYYCFQGSQFPYTFGQGTKVEIK
>Light Chain of Pinatuzumab IgG histidine scanning variant #8 (SEQ ID NO: 198)
DIQMTQSPSSLSASVGDRVTITCRSSQSIVASVGNTFLEWYQQKPGKAPKLLIYKVSN
RFSGVPSRFSGSGSGTDFTLTISSLQPEDFATYYCFQGSQFPYTFGQGTKVEIK
>Light Chain of Pinatuzumab IgG histidine scanning variant #9 (SEQ ID NO: 199)
DIQMTQSPSSLSASVGDRVTITCRSSQSIVHHVGNTFLEWYQQKPGKAPKLLIYKVSN
RFSGVPSRFSGSGSGTDFTLTISSLQPEDFATYYCFQGSQFPYTFGQGTKVEIK
>Light Chain of Pinatuzumab IgG histidine scanning variant #10 (SEQ ID NO: 200)
DIQMTQSPSSLSASVGDRVTITCRSSQSIVHSHGNTFLEWYQQKPGKAPKLLIYKVSN
RFSGVPSRFSGSGSGTDFTLTISSLQPEDFATYYCFQGSQFPYTFGQGTKVEIK
>Light Chain of Pinatuzumab IgG histidine scanning variant #11 (SEQ ID NO: 201)
DIQMTQSPSSLSASVGDRVTITCRSSQSIVHSVHNTFLEWYQQKPGKAPKLLIYKVSN
RFSGVPSRFSGSGSGTDFTLTISSLQPEDFATYYCFQGSQFPYTFGQGTKVEIK
>Light Chain of Pinatuzumab IgG histidine scanning variant #12 (SEQ ID NO: 202)
DIQMTQSPSSLSASVGDRVTITCRSSQSIVHSVGHTFLEWYQQKPGKAPKLLIYKVSN
RFSGVPSRFSGSGSGTDFTLTISSLQPEDFATYYCFQGSQFPYTFGQGTKVEIK
>Light Chain of Pinatuzumab IgG histidine scanning variant #13 (SEQ ID NO: 203)
DIQMTQSPSSLSASVGDRVTITCRSSQSIVHSVGNHFLEWYQQKPGKAPKLLIYKVSN
RFSGVPSRFSGSGSGTDFTLTISSLQPEDFATYYCFQGSQFPYTFGQGTKVEIK
>Light Chain of Pinatuzumab IgG histidine scanning variant #14 (SEQ ID NO: 204)
DIQMTQSPSSLSASVGDRVTITCRSSQSIVHSVGNTHLEWYQQKPGKAPKLLIYKVSN
RFSGVPSRFSGSGSGTDFTLTISSLQPEDFATYYCFQGSQFPYTFGQGTKVEIK
>Light Chain of Pinatuzumab IgG histidine scanning variant #15 (SEQ ID NO: 205)
DIQMTQSPSSLSASVGDRVTITCRSSQSIVHSVGNTFHEWYQQKPGKAPKLLIYKVSN
RFSGVPSRFSGSGSGTDFTLTISSLQPEDFATYYCFQGSQFPYTFGQGTKVEIK
>Light Chain of Pinatuzumab IgG histidine scanning variant #16 (SEQ ID NO: 206)
DIQMTQSPSSLSASVGDRVTITCRSSQSIVHSVGNTFLHWYQQKPGKAPKLLIYKVSN
RFSGVPSRFSGSGSGTDFTLTISSLQPEDFATYYCFQGSQFPYTFGQGTKVEIK
>Light Chain of Pinatuzumab IgG histidine scanning variant #17 (SEQ ID NO: 207)
DIQMTQSPSSLSASVGDRVTITCRSSQSIVHSVGNTFLEWYQQKPGKAPKLLIYHVSN
RFSGVPSRFSGSGSGTDFTLTISSLQPEDFATYYCFQGSQFPYTFGQGTKVEIK
>Light Chain of Pinatuzumab IgG histidine scanning variant #18 (SEQ ID NO: 208)
DIQMTQSPSSLSASVGDRVTITCRSSQSIVHSVGNTFLEWYQQKPGKAPKLLIYKHSN
RFSGVPSRFSGSGSGTDFTLTISSLQPEDFATYYCFQGSQFPYTFGQGTKVEIK
>Light Chain of Pinatuzumab IgG histidine scanning variant #19 (SEQ ID NO: 209)
DIQMTQSPSSLSASVGDRVTITCRSSQSIVHSVGNTFLEWYQQKPGKAPKLLIYKVHN
RFSGVPSRFSGSGSGTDFTLTISSLQPEDFATYYCFQGSQFPYTFGQGTKVEIK
>Light Chain of Pinatuzumab IgG histidine scanning variant #20 (SEQ ID NO: 210)
DIQMTQSPSSLSASVGDRVTITCRSSQSIVHSVGNTFLEWYQQKPGKAPKLLIYKVSH
RFSGVPSRFSGSGSGTDFTLTISSLQPEDFATYYCFQGSQFPYTFGQGTKVEIK
>Light Chain of Pinatuzumab IgG histidine scanning variant #21 (SEQ ID NO: 211)
DIQMTQSPSSLSASVGDRVTITCRSSQSIVHSVGNTFLEWYQQKPGKAPKLLIYKVSN
HFSGVPSRFSGSGSGTDFTLTISSLQPEDFATYYCFQGSQFPYTFGQGTKVEIK
>Light Chain of Pinatuzumab IgG histidine scanning variant #22 (SEQ ID NO: 212)
DIQMTQSPSSLSASVGDRVTITCRSSQSIVHSVGNTFLEWYQQKPGKAPKLLIYKVSN
RHSGVPSRFSGSGSGTDFTLTISSLQPEDFATYYCFQGSQFPYTFGQGTKVEIK
>Light Chain of Pinatuzumab IgG histidine scanning variant #23 (SEQ ID NO: 213)
DIQMTQSPSSLSASVGDRVTITCRSSQSIVHSVGNTFLEWYQQKPGKAPKLLIYKVSN
RFHGVPSRFSGSGSGTDFTLTISSLQPEDFATYYCFQGSQFPYTFGQGTKVEIK
>Light Chain of Pinatuzumab IgG histidine scanning variant #24 (SEQ ID NO: 214)
DIQMTQSPSSLSASVGDRVTITCRSSQSIVHSVGNTFLEWYQQKPGKAPKLLIYKVSN
RFSGVPSRFSGSGSGTDFTLTISSLQPEDFATYYCHQGSQFPYTFGQGTKVEIK
>Light Chain of Pinatuzumab IgG histidine scanning variant #25 (SEQ ID NO: 215)
DIQMTQSPSSLSASVGDRVTITCRSSQSIVHSVGNTFLEWYQQKPGKAPKLLIYKVSN
RFSGVPSRFSGSGSGTDFTLTISSLQPEDFATYYCFHGSQFPYTFGQGTKVEIK
>Light Chain of Pinatuzumab IgG histidine scanning variant #26 (SEQ ID NO: 216)
DIQMTQSPSSLSASVGDRVTITCRSSQSIVHSVGNTFLEWYQQKPGKAPKLLIYKVSN
RFSGVPSRFSGSGSGTDFTLTISSLQPEDFATYYCFQHSQFPYTFGQGTKVEIK
>Light Chain of Pinatuzumab IgG histidine scanning variant #27 (SEQ ID NO: 217)
DIQMTQSPSSLSASVGDRVTITCRSSQSIVHSVGNTFLEWYQQKPGKAPKLLIYKVSN
RFSGVPSRFSGSGSGTDFTLTISSLQPEDFATYYCFQGHQFPYTFGQGTKVEIK
>Light Chain of Pinatuzumab IgG histidine scanning variant #28 (SEQ ID NO: 218)
DIQMTQSPSSLSASVGDRVTITCRSSQSIVHSVGNTFLEWYQQKPGKAPKLLIYKVSN
RFSGVPSRFSGSGSGTDFTLTISSLQPEDFATYYCFQGSHFPYTFGQGTKVEIK
>Light Chain of Pinatuzumab IgG histidine scanning variant #29 (SEQ ID NO: 219)
DIQMTQSPSSLSASVGDRVTITCRSSQSIVHSVGNTFLEWYQQKPGKAPKLLIYKVSN
RFSGVPSRFSGSGSGTDFTLTISSLQPEDFATYYCFQGSQHPYTFGQGTKVEIK
>Light Chain of Pinatuzumab IgG histidine scanning variant #30 (SEQ ID NO: 220)
DIQMTQSPSSLSASVGDRVTITCRSSQSIVHSVGNTFLEWYQQKPGKAPKLLIYKVSN
RFSGVPSRFSGSGSGTDFTLTISSLQPEDFATYYCFQGSQFHYTFGQGTKVEIK
>Light Chain of Pinatuzumab IgG histidine scanning variant #31 (SEQ ID NO: 221)
DIQMTQSPSSLSASVGDRVTITCRSSQSIVHSVGNTFLEWYQQKPGKAPKLLIYKVSN
RFSGVPSRFSGSGSGTDFTLTISSLQPEDFATYYCFQGSQFPHTFGQGTKVEIK
>Light Chain of Pinatuzumab IgG histidine scanning variant #32 (SEQ ID NO: 222)
DIQMTQSPSSLSASVGDRVTITCRSSQSIVHSVGNTFLEWYQQKPGKAPKLLIYKVSN
RFSGVPSRFSGSGSGTDFTLTISSLQPEDFATYYCFQGSQFPYHFGQGTKVEIK
>Heavy Chain Combinations of Pinatuzumab IgG histidine scanning variant #1 (SEQ ID NO:
223)
EVQLVESGGGLVQPGGSLRLSCAASGYEHSRSWHNWVRQAPGKGLEWVGRIYPGD
GDTNYSGKFKGRFTISADTSKNTAYLQMNSLRAEDTAVYYCARDGSSWDWYFDVW
GQGTLVTVSS
>Heavy Chain Combinations of Pinatuzumab IgG histidine scanning variant #2 (SEQ ID NO:
224)
EVQLVESGGGLVQPGGSLRLSCAASGYEHSRSWMNWVRQAPGKGLEWVGRIYPGD
GDTHYSGKFKGRFTISADTSKNTAYLQMNSLRAEDTAVYYCARDGSSWDWYFDVW
GQGTLVTVSS
>Heavy Chain Combinations of Pinatuzumab IgG histidine scanning variant #3 (SEQ ID NO:
225)
EVQLVESGGGLVQPGGSLRLSCAASGYEHSRSWMNWVRQAPGKGLEWVGRIYPGD
GDTNYSGKHKGRFTISADTSKNTAYLQMNSLRAEDTAVYYCARDGSSWDWYFDV
WGQGTLVTVSS
>Heavy Chain Combinations of Pinatuzumab IgG histidine scanning variant #4 (SEQ ID NO:
226)
EVQLVESGGGLVQPGGSLRLSCAASGYEFSRSWHNWVRQAPGKGLEWVGRIYPGD
GDTHYSGKFKGRFTISADTSKNTAYLQMNSLRAEDTAVYYCARDGSSWDWYFDVW
GQGTLVTVSS
>Heavy Chain Combinations of Pinatuzumab IgG histidine scanning variant #5 (SEQ ID NO:
227)
EVQLVESGGGLVQPGGSLRLSCAASGYEFSRSWHNWVRQAPGKGLEWVGRIYPGD
GDTNYSGKHKGRFTISADTSKNTAYLQMNSLRAEDTAVYYCARDGSSWDWYFDV
WGQGTLVTVSS
>Heavy Chain Combinations of Pinatuzumab IgG histidine scanning variant #6 (SEQ ID NO:
228)
EVQLVESGGGLVQPGGSLRLSCAASGYEFSRSWMNWVRQAPGKGLEWVGRIYPGD
GDTHYSGKHKGRFTISADTSKNTAYLQMNSLRAEDTAVYYCARDGSSWDWYFDV
WGQGTLVTVSS
>Heavy Chain Combinations of Pinatuzumab IgG histidine scanning variant #7 (SEQ ID NO:
229)
EVQLVESGGGLVQPGGSLRLSCAASGYEHSRSWHNWVRQAPGKGLEWVGRIYPGD
GDTHYSGKFKGRFTISADTSKNTAYLQMNSLRAEDTAVYYCARDGSSWDWYFDVW
GQGTLVTVSS
>Heavy Chain Combinations of Pinatuzumab IgG histidine scanning variant #8 (SEQ ID NO:
230)
EVQLVESGGGLVQPGGSLRLSCAASGYEHSRSWHNWVRQAPGKGLEWVGRIYPGD
GDTNYSGKHKGRFTISADTSKNTAYLQMNSLRAEDTAVYYCARDGSSWDWYFDV
WGQGTLVTVSS
>Heavy Chain Combinations of Pinatuzumab IgG histidine scanning variant #9 (SEQ ID NO:
231)
EVQLVESGGGLVQPGGSLRLSCAASGYEHSRSWMNWVRQAPGKGLEWVGRIYPGD
GDTHYSGKHKGRFTISADTSKNTAYLQMNSLRAEDTAVYYCARDGSSWDWYFDV
WGQGTLVTVSS
>Heavy Chain Combinations of Pinatuzumab IgG histidine scanning variant #10 (SEQ ID
NO: 232)
EVQLVESGGGLVQPGGSLRLSCAASGYEFSRSWHNWVRQAPGKGLEWVGRIYPGD
GDTHYSGKHKGRFTISADTSKNTAYLQMNSLRAEDTAVYYCARDGSSWDWYFDV
WGQGTLVTVSS
>Heavy Chain Combinations of Pinatuzumab IgG histidine scanning variant #11 (SEQ ID
NO: 233)
EVQLVESGGGLVQPGGSLRLSCAASGYEFSRSWMNWVRQAPGKGLEWVGRIYPGD
GHTNYSGKFKGRFTISADTSKNTAYLQMNSLRAEDTAVYYCARDGHSWDWYFDV
WGQGTLVTVSS
>Heavy Chain Combinations of Pinatuzumab IgG histidine scanning variant #12 (SEQ ID
NO: 234)
EVQLVESGGGLVQPGGSLRLSCAASGYEFSRSWMNWVRQAPGKGLEWVGRIYPGD
GHTNYSGKFKGRFTISADTSKNTAYLQMNSLRAEDTAVYYCARDGSHWDWYFDV
WGQGTLVTVSS
>Heavy Chain Combinations of Pinatuzumab IgG histidine scanning variant #13 (SEQ ID
NO: 235)
EVQLVESGGGLVQPGGSLRLSCAASGYEFSRSWMNWVRQAPGKGLEWVGRIYPGD
GHTNYSGKFKGRFTISADTSKNTAYLQMNSLRAEDTAVYYCARDGSSWHWYFDVW
GQGTLVTVSS
>Heavy Chain Combinations of Pinatuzumab IgG histidine scanning variant #14 (SEQ ID
NO: 236)
EVQLVESGGGLVQPGGSLRLSCAASGYEFSRSWMNWVRQAPGKGLEWVGRIYPGD
GHTNYSGKFKGRFTISADTSKNTAYLQMNSLRAEDTAVYYCARDGSSWDWHFDVW
GQGTLVTVSS
>Heavy Chain Combinations of Pinatuzumab IgG histidine scanning variant #15 (SEQ ID
NO: 237)
EVQLVESGGGLVQPGGSLRLSCAASGYEFSRSWMNWVRQAPGKGLEWVGRIYPGD
GHTNYSGKFKGRFTISADTSKNTAYLQMNSLRAEDTAVYYCARDGSSWDWYHDV
WGQGTLVTVSS
>Heavy Chain Combinations of Pinatuzumab IgG histidine scanning variant #16 (SEQ ID
NO: 238)
EVQLVESGGGLVQPGGSLRLSCAASGYEFSRSWMNWVRQAPGKGLEWVGRIYPGD
GDTNYSGKFKGRFTISADTSKNTAYLQMNSLRAEDTAVYYCARDGHHWDWYFDV
WGQGTLVTVSS
>Heavy Chain Combinations of Pinatuzumab IgG histidine scanning variant #17 (SEQ ID
NO: 239)
EVQLVESGGGLVQPGGSLRLSCAASGYEFSRSWMNWVRQAPGKGLEWVGRIYPGD
GDTNYSGKFKGRFTISADTSKNTAYLQMNSLRAEDTAVYYCARDGHSWHWYFDV
WGQGTLVTVSS
>Heavy Chain Combinations of Pinatuzumab IgG histidine scanning variant #18 (SEQ ID
NO: 240)
EVQLVESGGGLVQPGGSLRLSCAASGYEFSRSWMNWVRQAPGKGLEWVGRIYPGD
GDTNYSGKFKGRFTISADTSKNTAYLQMNSLRAEDTAVYYCARDGHSWDWHFDV
WGQGTLVTVSS
>Heavy Chain Combinations of Pinatuzumab IgG histidine scanning variant #19 (SEQ ID
NO: 241)
EVQLVESGGGLVQPGGSLRLSCAASGYEFSRSWMNWVRQAPGKGLEWVGRIYPGD
GDTNYSGKFKGRFTISADTSKNTAYLQMNSLRAEDTAVYYCARDGHSWDWYHDV
WGQGTLVTVSS
>Heavy Chain Combinations of Pinatuzumab IgG histidine scanning variant #20 (SEQ ID
NO: 242)
EVQLVESGGGLVQPGGSLRLSCAASGYEFSRSWMNWVRQAPGKGLEWVGRIYPGD
GDTNYSGKFKGRFTISADTSKNTAYLQMNSLRAEDTAVYYCARDGSHWHWYFDV
WGQGTLVTVSS
>Heavy Chain Combinations of Pinatuzumab IgG histidine scanning variant #21 (SEQ ID
NO: 243)
EVQLVESGGGLVQPGGSLRLSCAASGYEFSRSWMNWVRQAPGKGLEWVGRIYPGD
GDTNYSGKFKGRFTISADTSKNTAYLQMNSLRAEDTAVYYCARDGSHWDWHFDV
WGQGTLVTVSS
>Heavy Chain Combinations of Pinatuzumab IgG histidine scanning variant #22 (SEQ ID
NO: 244)
EVQLVESGGGLVQPGGSLRLSCAASGYEFSRSWMNWVRQAPGKGLEWVGRIYPGD
GDTNYSGKFKGRFTISADTSKNTAYLQMNSLRAEDTAVYYCARDGSHWDWYHDV
WGQGTLVTVSS
>Heavy Chain Combinations of Pinatuzumab IgG histidine scanning variant #23 (SEQ ID
NO: 245)
EVQLVESGGGLVQPGGSLRLSCAASGYEFSRSWMNWVRQAPGKGLEWVGRIYPGD
GDTNYSGKFKGRFTISADTSKNTAYLQMNSLRAEDTAVYYCARDGSSWHWHFDVW
GQGTLVTVSS
>Heavy Chain Combinations of Pinatuzumab IgG histidine scanning variant #24 (SEQ ID
NO: 246)
EVQLVESGGGLVQPGGSLRLSCAASGYEFSRSWMNWVRQAPGKGLEWVGRIYPGD
GDTNYSGKFKGRFTISADTSKNTAYLQMNSLRAEDTAVYYCARDGSSWHWYHDV
WGQGTLVTVSS
>Heavy Chain Combinations of Pinatuzumab IgG histidine scanning variant #25 (SEQ ID
NO: 247)
EVQLVESGGGLVQPGGSLRLSCAASGYEFSRSWMNWVRQAPGKGLEWVGRIYPGD
GDTNYSGKFKGRFTISADTSKNTAYLQMNSLRAEDTAVYYCARDGSSWDWHHDV
WGQGTLVTVSS
>Heavy Chain Combinations of Pinatuzumab IgG histidine scanning variant #26 (SEQ ID
NO: 248)
EVQLVESGGGLVQPGGSLRLSCAASGYEFSRSWMNWVRQAPGKGLEWVGRIYPGD
GHTNYSGKFKGRFTISADTSKNTAYLQMNSLRAEDTAVYYCARDGHHWDWYFDV
WGQGTLVTVSS
>Heavy Chain Combinations of Pinatuzumab IgG histidine scanning variant #27 (SEQ ID
NO: 249)
EVQLVESGGGLVQPGGSLRLSCAASGYEFSRSWMNWVRQAPGKGLEWVGRIYPGD
GHTNYSGKFKGRFTISADTSKNTAYLQMNSLRAEDTAVYYCARDGHSWHWYFDV
WGQGTLVTVSS
>Heavy Chain Combinations of Pinatuzumab IgG histidine scanning variant #28 (SEQ ID
NO: 250)
EVQLVESGGGLVQPGGSLRLSCAASGYEFSRSWMNWVRQAPGKGLEWVGRIYPGD
GHTNYSGKFKGRFTISADTSKNTAYLQMNSLRAEDTAVYYCARDGHSWDWHFDV
WGQGTLVTVSS
>Heavy Chain Combinations of Pinatuzumab IgG histidine scanning variant #29 (SEQ ID
NO: 251)
EVQLVESGGGLVQPGGSLRLSCAASGYEFSRSWMNWVRQAPGKGLEWVGRIYPGD
GHTNYSGKFKGRFTISADTSKNTAYLQMNSLRAEDTAVYYCARDGHSWDWYHDV
WGQGTLVTVSS
>Heavy Chain Combinations of Pinatuzumab IgG histidine scanning variant #30 (SEQ ID
NO: 252)
EVQLVESGGGLVQPGGSLRLSCAASGYEFSRSWMNWVRQAPGKGLEWVGRIYPGD
GHTNYSGKFKGRFTISADTSKNTAYLQMNSLRAEDTAVYYCARDGSHWHWYFDV
WGQGTLVTVSS
>Heavy Chain Combinations of Pinatuzumab IgG histidine scanning variant #31 (SEQ ID
NO: 253)
EVQLVESGGGLVQPGGSLRLSCAASGYEFSRSWMNWVRQAPGKGLEWVGRIYPGD
GHTNYSGKFKGRFTISADTSKNTAYLQMNSLRAEDTAVYYCARDGSHWDWHFDV
WGQGTLVTVSS
>Heavy Chain Combinations of Pinatuzumab IgG histidine scanning variant #32 (SEQ ID
NO: 254)
EVQLVESGGGLVQPGGSLRLSCAASGYEFSRSWMNWVRQAPGKGLEWVGRIYPGD
GHTNYSGKFKGRFTISADTSKNTAYLQMNSLRAEDTAVYYCARDGSHWDWYHDV
WGQGTLVTVSS
>Heavy Chain Combinations of Pinatuzumab IgG histidine scanning variant #33 (SEQ ID
NO: 255)
EVQLVESGGGLVQPGGSLRLSCAASGYEFSRSWMNWVRQAPGKGLEWVGRIYPGD
GHTNYSGKFKGRFTISADTSKNTAYLQMNSLRAEDTAVYYCARDGSSWHWHFDVW
GQGTLVTVSS
>Heavy Chain Combinations of Pinatuzumab IgG histidine scanning variant #34 (SEQ ID
NO: 256)
EVQLVESGGGLVQPGGSLRLSCAASGYEFSRSWMNWVRQAPGKGLEWVGRIYPGD
GHTNYSGKFKGRFTISADTSKNTAYLQMNSLRAEDTAVYYCARDGSSWHWYHDV
WGQGTLVTVSS
>Heavy Chain Combinations of Pinatuzumab IgG histidine scanning variant #35 (SEQ ID
NO: 257)
EVQLVESGGGLVQPGGSLRLSCAASGYEFSRSWMNWVRQAPGKGLEWVGRIYPGD
GHTNYSGKFKGRFTISADTSKNTAYLQMNSLRAEDTAVYYCARDGSSWDWHHDV
WGQGTLVTVSS
>Heavy Chain Combinations of Pinatuzumab IgG histidine scanning variant #36 (SEQ ID
NO: 258)
EVQLVESGGGLVQPGGSLRLSCAASGYEFSRSWMNWVRQAPGKGLEWVGRIYPGD
GDTNYSGKFKGRFTISADTSKNTAYLQMNSLRAEDTAVYYCARDGHHWHWYFDV
WGQGTLVTVSS
>Heavy Chain Combinations of Pinatuzumab IgG histidine scanning variant #37 (SEQ ID
NO: 259)
EVQLVESGGGLVQPGGSLRLSCAASGYEFSRSWMNWVRQAPGKGLEWVGRIYPGD
GDTNYSGKFKGRFTISADTSKNTAYLQMNSLRAEDTAVYYCARDGHHWDWHFDV
WGQGTLVTVSS
>Heavy Chain Combinations of Pinatuzumab IgG histidine scanning variant #38 (SEQ ID
NO: 260)
EVQLVESGGGLVQPGGSLRLSCAASGYEFSRSWMNWVRQAPGKGLEWVGRIYPGD
GDTNYSGKFKGRFTISADTSKNTAYLQMNSLRAEDTAVYYCARDGHHWDWYHDV
WGQGTLVTVSS
>Heavy Chain Combinations of Pinatuzumab IgG histidine scanning variant #39 (SEQ ID
NO: 261)
EVQLVESGGGLVQPGGSLRLSCAASGYEFSRSWMNWVRQAPGKGLEWVGRIYPGD
GDTNYSGKFKGRFTISADTSKNTAYLQMNSLRAEDTAVYYCARDGHSWHWHFDV
WGQGTLVTVSS
>Heavy Chain Combinations of Pinatuzumab IgG histidine scanning variant #40 (SEQ ID
NO: 262)
EVQLVESGGGLVQPGGSLRLSCAASGYEFSRSWMNWVRQAPGKGLEWVGRIYPGD
GDTNYSGKFKGRFTISADTSKNTAYLQMNSLRAEDTAVYYCARDGHSWHWYHDV
WGQGTLVTVSS
>Heavy Chain Combinations of Pinatuzumab IgG histidine scanning variant #41 (SEQ ID
NO: 263)
EVQLVESGGGLVQPGGSLRLSCAASGYEFSRSWMNWVRQAPGKGLEWVGRIYPGD
GDTNYSGKFKGRFTISADTSKNTAYLQMNSLRAEDTAVYYCARDGHSWDWHHDV
WGQGTLVTVSS
>Heavy Chain Combinations of Pinatuzumab IgG histidine scanning variant #42 (SEQ ID
NO: 264)
EVQLVESGGGLVQPGGSLRLSCAASGYEFSRSWMNWVRQAPGKGLEWVGRIYPGD
GDTNYSGKFKGRFTISADTSKNTAYLQMNSLRAEDTAVYYCARDGSHWHWHFDV
WGQGTLVTVSS
>Heavy Chain Combinations of Pinatuzumab IgG histidine scanning variant #43 (SEQ ID
NO: 265)
EVQLVESGGGLVQPGGSLRLSCAASGYEFSRSWMNWVRQAPGKGLEWVGRIYPGD
GDTNYSGKFKGRFTISADTSKNTAYLQMNSLRAEDTAVYYCARDGSHWHWYHDV
WGQGTLVTVSS
>Heavy Chain Combinations of Pinatuzumab IgG histidine scanning variant #44 (SEQ ID
NO: 266)
EVQLVESGGGLVQPGGSLRLSCAASGYEFSRSWMNWVRQAPGKGLEWVGRIYPGD
GDTNYSGKFKGRFTISADTSKNTAYLQMNSLRAEDTAVYYCARDGSHWDWHHDV
WGQGTLVTVSS
>Heavy Chain Combinations of Pinatuzumab IgG histidine scanning variant #45 (SEQ ID
NO: 267)
EVQLVESGGGLVQPGGSLRLSCAASGYEFSRSWMNWVRQAPGKGLEWVGRIYPGD
GDTNYSGKFKGRFTISADTSKNTAYLQMNSLRAEDTAVYYCARDGSSWHWHHDV
WGQGTLVTVSS
>Heavy Chain of TRPH-222 IgG (SEQ ID NO: 268)
EVQLVESGGGLVKPGGSLRLSCAASGFAFSIYDMSWVRQAPGKGLEWVAYISSGGG
TTYYPDTVKGRFTISRDNAKNSLYLQMSSLRAEDTAMYYCARHSGYGSSYGVLFAY
WGQGTLVTVSS
>Light Chain of TRPH-222 IgG (SEQ ID NO: 269)
DIQMTQSPSSLSASVGDRVTITCRASQDISNYLNWYQQKPGKAVKLLIYYTSILHSGV
PSRFSGSGSGTDYTLTISSLQQEDFATYFCQQGNTLPWTFGGGTKVEIK
>Heavy Chain CDR1 of TRPH-222 (SEQ ID NO: 270)
GFAFSIYDMS
>Heavy Chain CDR2 of TRPH-222 (SEQ ID NO: 271)
YISSGGGTTYYPDTVKG
>Heavy Chain CDR3 of TRPH-222 (SEQ ID NO: 272)
ARHSGYGSSYGV
>Light Chain CDR1 of TRPH-222 (SEQ ID NO: 273)
RASQDISNYLN
>Light Chain CDR2 of TRPH-222 (SEQ ID NO: 274)
YTSILHS
>Light Chain CDR3 of TRPH-222 (SEQ ID NO: 275)
QQGNTLPWT
>Heavy Chain of TRPH-222 IgG histidine scanning variant #1 (SEQ ID NO: 276)
EVQLVESGGGLVKPGGSLRLSCAASHFAFSIYDMSWVRQAPGKGLEWVAYISSGGG
TTYYPDTVKGRFTISRDNAKNSLYLQMSSLRAEDTAMYYCARHSGYGSSYGVLFAY
WGQGTLVTVSS
>Heavy Chain of TRPH-222 IgG histidine scanning variant #2 (SEQ ID NO: 277)
EVQLVESGGGLVKPGGSLRLSCAASGHAFSIYDMSWVRQAPGKGLEWVAYISSGGG
TTYYPDTVKGRFTISRDNAKNSLYLQMSSLRAEDTAMYYCARHSGYGSSYGVLFAY
WGQGTLVTVSS
>Heavy Chain of TRPH-222 IgG histidine scanning variant #3 (SEQ ID NO: 278)
EVQLVESGGGLVKPGGSLRLSCAASGFHFSIYDMSWVRQAPGKGLEWVAYISSGGG
TTYYPDTVKGRFTISRDNAKNSLYLQMSSLRAEDTAMYYCARHSGYGSSYGVLFAY
WGQGTLVTVSS
>Heavy Chain of TRPH-222 IgG histidine scanning variant #4 (SEQ ID NO: 279)
EVQLVESGGGLVKPGGSLRLSCAASGFAHSIYDMSWVRQAPGKGLEWVAYISSGGG
TTYYPDTVKGRFTISRDNAKNSLYLQMSSLRAEDTAMYYCARHSGYGSSYGVLFAY
WGQGTLVTVSS
>Heavy Chain of TRPH-222 IgG histidine scanning variant #5 (SEQ ID NO: 280)
EVQLVESGGGLVKPGGSLRLSCAASGFAFHIYDMSWVRQAPGKGLEWVAYISSGGG
TTYYPDTVKGRFTISRDNAKNSLYLQMSSLRAEDTAMYYCARHSGYGSSYGVLFAY
WGQGTLVTVSS
>Heavy Chain of TRPH-222 IgG histidine scanning variant #6 (SEQ ID NO: 281)
EVQLVESGGGLVKPGGSLRLSCAASGFAFSHYDMSWVRQAPGKGLEWVAYISSGG
GTTYYPDTVKGRFTISRDNAKNSLYLQMSSLRAEDTAMYYCARHSGYGSSYGVLFA
YWGQGTLVTVSS
>Heavy Chain of TRPH-222 IgG histidine scanning variant #7 (SEQ ID NO: 282)
EVQLVESGGGLVKPGGSLRLSCAASGFAFSIHDMSWVRQAPGKGLEWVAYISSGGG
TTYYPDTVKGRFTISRDNAKNSLYLQMSSLRAEDTAMYYCARHSGYGSSYGVLFAY
WGQGTLVTVSS
>Heavy Chain of TRPH-222 IgG histidine scanning variant #8 (SEQ ID NO: 283)
EVQLVESGGGLVKPGGSLRLSCAASGFAFSIYHMSWVRQAPGKGLEWVAYISSGGG
TTYYPDTVKGRFTISRDNAKNSLYLQMSSLRAEDTAMYYCARHSGYGSSYGVLFAY
WGQGTLVTVSS
>Heavy Chain of TRPH-222 IgG histidine scanning variant #9 (SEQ ID NO: 284)
EVQLVESGGGLVKPGGSLRLSCAASGFAFSIYDHSWVRQAPGKGLEWVAYISSGGG
TTYYPDTVKGRFTISRDNAKNSLYLQMSSLRAEDTAMYYCARHSGYGSSYGVLFAY
WGQGTLVTVSS
>Heavy Chain of TRPH-222 IgG histidine scanning variant #10 (SEQ ID NO: 285)
EVQLVESGGGLVKPGGSLRLSCAASGFAFSIYDMHWVRQAPGKGLEWVAYISSGGG
TTYYPDTVKGRFTISRDNAKNSLYLQMSSLRAEDTAMYYCARHSGYGSSYGVLFAY
WGQGTLVTVSS
>Heavy Chain of TRPH-222 IgG histidine scanning variant #11 (SEQ ID NO: 286)
EVQLVESGGGLVKPGGSLRLSCAASGFAFSIYDMSWVRQAPGKGLEWVAHISSGGG
TTYYPDTVKGRFTISRDNAKNSLYLQMSSLRAEDTAMYYCARHSGYGSSYGVLFAY
WGQGTLVTVSS
>Heavy Chain of TRPH-222 IgG histidine scanning variant #12 (SEQ ID NO: 287)
EVQLVESGGGLVKPGGSLRLSCAASGFAFSIYDMSWVRQAPGKGLEWVAYHSSGG
GTTYYPDTVKGRFTISRDNAKNSLYLQMSSLRAEDTAMYYCARHSGYGSSYGVLFA
YWGQGTLVTVSS
>Heavy Chain of TRPH-222 IgG histidine scanning variant #13 (SEQ ID NO: 288)
EVQLVESGGGLVKPGGSLRLSCAASGFAFSIYDMSWVRQAPGKGLEWVAYIHSGGG
TTYYPDTVKGRFTISRDNAKNSLYLQMSSLRAEDTAMYYCARHSGYGSSYGVLFAY
WGQGTLVTVSS
>Heavy Chain of TRPH-222 IgG histidine scanning variant #14 (SEQ ID NO: 289)
EVQLVESGGGLVKPGGSLRLSCAASGFAFSIYDMSWVRQAPGKGLEWVAYISHGGG
TTYYPDTVKGRFTISRDNAKNSLYLQMSSLRAEDTAMYYCARHSGYGSSYGVLFAY
WGQGTLVTVSS
>Heavy Chain of TRPH-222 IgG histidine scanning variant #15 (SEQ ID NO: 290)
EVQLVESGGGLVKPGGSLRLSCAASGFAFSIYDMSWVRQAPGKGLEWVAYISSHGG
TTYYPDTVKGRFTISRDNAKNSLYLQMSSLRAEDTAMYYCARHSGYGSSYGVLFAY
WGQGTLVTVSS
>Heavy Chain of TRPH-222 IgG histidine scanning variant #16 (SEQ ID NO: 291)
EVQLVESGGGLVKPGGSLRLSCAASGFAFSIYDMSWVRQAPGKGLEWVAYISSGHG
TTYYPDTVKGRFTISRDNAKNSLYLQMSSLRAEDTAMYYCARHSGYGSSYGVLFAY
WGQGTLVTVSS
>Heavy Chain of TRPH-222 IgG histidine scanning variant #17 (SEQ ID NO: 292)
EVQLVESGGGLVKPGGSLRLSCAASGFAFSIYDMSWVRQAPGKGLEWVAYISSGGH
TTYYPDTVKGRFTISRDNAKNSLYLQMSSLRAEDTAMYYCARHSGYGSSYGVLFAY
WGQGTLVTVSS
>Heavy Chain of TRPH-222 IgG histidine scanning variant #18 (SEQ ID NO: 293)
EVQLVESGGGLVKPGGSLRLSCAASGFAFSIYDMSWVRQAPGKGLEWVAYISSGGG
HTYYPDTVKGRFTISRDNAKNSLYLQMSSLRAEDTAMYYCARHSGYGSSYGVLFAY
WGQGTLVTVSS
>Heavy Chain of TRPH-222 IgG histidine scanning variant #19 (SEQ ID NO: 294)
EVQLVESGGGLVKPGGSLRLSCAASGFAFSIYDMSWVRQAPGKGLEWVAYISSGGG
THYYPDTVKGRFTISRDNAKNSLYLQMSSLRAEDTAMYYCARHSGYGSSYGVLFAY
WGQGTLVTVSS
>Heavy Chain of TRPH-222 IgG histidine scanning variant #20 (SEQ ID NO: 295)
EVQLVESGGGLVKPGGSLRLSCAASGFAFSIYDMSWVRQAPGKGLEWVAYISSGGG
TTHYPDTVKGRFTISRDNAKNSLYLQMSSLRAEDTAMYYCARHSGYGSSYGVLFAY
WGQGTLVTVSS
>Heavy Chain of TRPH-222 IgG histidine scanning variant #21 (SEQ ID NO: 296)
EVQLVESGGGLVKPGGSLRLSCAASGFAFSIYDMSWVRQAPGKGLEWVAYISSGGG
TTYHPDTVKGRFTISRDNAKNSLYLQMSSLRAEDTAMYYCARHSGYGSSYGVLFAY
WGQGTLVTVSS
>Heavy Chain of TRPH-222 IgG histidine scanning variant #22 (SEQ ID NO: 297)
EVQLVESGGGLVKPGGSLRLSCAASGFAFSIYDMSWVRQAPGKGLEWVAYISSGGG
TTYYHDTVKGRFTISRDNAKNSLYLQMSSLRAEDTAMYYCARHSGYGSSYGVLFAY
WGQGTLVTVSS
>Heavy Chain of TRPH-222 IgG histidine scanning variant #23 (SEQ ID NO: 298)
EVQLVESGGGLVKPGGSLRLSCAASGFAFSIYDMSWVRQAPGKGLEWVAYISSGGG
TTYYPHTVKGRFTISRDNAKNSLYLQMSSLRAEDTAMYYCARHSGYGSSYGVLFAY
WGQGTLVTVSS
>Heavy Chain of TRPH-222 IgG histidine scanning variant #24 (SEQ ID NO: 299)
EVQLVESGGGLVKPGGSLRLSCAASGFAFSIYDMSWVRQAPGKGLEWVAYISSGGG
TTYYPDHVKGRFTISRDNAKNSLYLQMSSLRAEDTAMYYCARHSGYGSSYGVLFAY
WGQGTLVTVSS
>Heavy Chain of TRPH-222 IgG histidine scanning variant #25 (SEQ ID NO: 300)
EVQLVESGGGLVKPGGSLRLSCAASGFAFSIYDMSWVRQAPGKGLEWVAYISSGGG
TTYYPDTHKGRFTISRDNAKNSLYLQMSSLRAEDTAMYYCARHSGYGSSYGVLFAY
WGQGTLVTVSS
>Heavy Chain of TRPH-222 IgG histidine scanning variant #26 (SEQ ID NO: 301)
EVQLVESGGGLVKPGGSLRLSCAASGFAFSIYDMSWVRQAPGKGLEWVAYISSGGG
TTYYPDTVHGRFTISRDNAKNSLYLQMSSLRAEDTAMYYCARHSGYGSSYGVLFAY
WGQGTLVTVSS
>Heavy Chain of TRPH-222 IgG histidine scanning variant #27 (SEQ ID NO: 302)
EVQLVESGGGLVKPGGSLRLSCAASGFAFSIYDMSWVRQAPGKGLEWVAYISSGGG
TTYYPDTVKHRFTISRDNAKNSLYLQMSSLRAEDTAMYYCARHSGYGSSYGVLFAY
WGQGTLVTVSS
>Heavy Chain of TRPH-222 IgG histidine scanning variant #28 (SEQ ID NO: 303)
EVQLVESGGGLVKPGGSLRLSCAASGFAFSIYDMSWVRQAPGKGLEWVAYISSGGG
TTYYPDTVKGRFTISRDNAKNSLYLQMSSLRAEDTAMYYCHRHSGYGSSYGVLFAY
WGQGTLVTVSS
>Heavy Chain of TRPH-222 IgG histidine scanning variant #29 (SEQ ID NO: 304)
EVQLVESGGGLVKPGGSLRLSCAASGFAFSIYDMSWVRQAPGKGLEWVAYISSGGG
TTYYPDTVKGRFTISRDNAKNSLYLQMSSLRAEDTAMYYCAHHSGYGSSYGVLFAY
WGQGTLVTVSS
>Heavy Chain of TRPH-222 IgG histidine scanning variant #30 (SEQ ID NO: 305)
EVQLVESGGGLVKPGGSLRLSCAASGFAFSIYDMSWVRQAPGKGLEWVAYISSGGG
TTYYPDTVKGRFTISRDNAKNSLYLQMSSLRAEDTAMYYCARASGYGSSYGVLFAY
WGQGTLVTVSS
>Heavy Chain of TRPH-222 IgG histidine scanning variant #31 (SEQ ID NO: 306)
EVQLVESGGGLVKPGGSLRLSCAASGFAFSIYDMSWVRQAPGKGLEWVAYISSGGG
TTYYPDTVKGRFTISRDNAKNSLYLQMSSLRAEDTAMYYCARHHGYGSSYGVLFAY
WGQGTLVTVSS
>Heavy Chain of TRPH-222 IgG histidine scanning variant #32 (SEQ ID NO: 307)
EVQLVESGGGLVKPGGSLRLSCAASGFAFSIYDMSWVRQAPGKGLEWVAYISSGGG
TTYYPDTVKGRFTISRDNAKNSLYLQMSSLRAEDTAMYYCARHSHYGSSYGVLFAY
WGQGTLVTVSS
>Heavy Chain of TRPH-222 IgG histidine scanning variant #33 (SEQ ID NO: 308)
EVQLVESGGGLVKPGGSLRLSCAASGFAFSIYDMSWVRQAPGKGLEWVAYISSGGG
TTYYPDTVKGRFTISRDNAKNSLYLQMSSLRAEDTAMYYCARHSGHGSSYGVLFAY
WGQGTLVTVSS
>Heavy Chain of TRPH-222 IgG histidine scanning variant #34 (SEQ ID NO: 309)
EVQLVESGGGLVKPGGSLRLSCAASGFAFSIYDMSWVRQAPGKGLEWVAYISSGGG
TTYYPDTVKGRFTISRDNAKNSLYLQMSSLRAEDTAMYYCARHSGYHSSYGVLFAY
WGQGTLVTVSS
>Heavy Chain of TRPH-222 IgG histidine scanning variant #35 (SEQ ID NO: 310)
EVQLVESGGGLVKPGGSLRLSCAASGFAFSIYDMSWVRQAPGKGLEWVAYISSGGG
TTYYPDTVKGRFTISRDNAKNSLYLQMSSLRAEDTAMYYCARHSGYGHSYGVLFAY
WGQGTLVTVSS
>Heavy Chain of TRPH-222 IgG histidine scanning variant #36 (SEQ ID NO: 311)
EVQLVESGGGLVKPGGSLRLSCAASGFAFSIYDMSWVRQAPGKGLEWVAYISSGGG
TTYYPDTVKGRFTISRDNAKNSLYLQMSSLRAEDTAMYYCARHSGYGSHYGVLFAY
WGQGTLVTVSS
>Heavy Chain of TRPH-222 IgG histidine scanning variant #37 (SEQ ID NO: 312)
EVQLVESGGGLVKPGGSLRLSCAASGFAFSIYDMSWVRQAPGKGLEWVAYISSGGG
TTYYPDTVKGRFTISRDNAKNSLYLQMSSLRAEDTAMYYCARHSGYGSSHGVLFAY
WGQGTLVTVSS
>Heavy Chain of TRPH-222 IgG histidine scanning variant #38 (SEQ ID NO: 313)
EVQLVESGGGLVKPGGSLRLSCAASGFAFSIYDMSWVRQAPGKGLEWVAYISSGGG
TTYYPDTVKGRFTISRDNAKNSLYLQMSSLRAEDTAMYYCARHSGYGSSYHVLFAY
WGQGTLVTVSS
>Heavy Chain of TRPH-222 IgG histidine scanning variant #39 (SEQ ID NO: 314)
EVQLVESGGGLVKPGGSLRLSCAASGFAFSIYDMSWVRQAPGKGLEWVAYISSGGG
TTYYPDTVKGRFTISRDNAKNSLYLQMSSLRAEDTAMYYCARHSGYGSSYGHLFAY
WGQGTLVTVSS
>Heavy Chain of TRPH-222 IgG histidine scanning variant #40 (SEQ ID NO: 315)
EVQLVESGGGLVKPGGSLRLSCAASGFAFSIYDMSWVRQAPGKGLEWVAYISSGGG
TTYYPDTVKGRFTISRDNAKNSLYLQMSSLRAEDTAMYYCARHSGYGSSYGVHFAY
WGQGTLVTVSS
>Heavy Chain of TRPH-222 IgG histidine scanning variant #41 (SEQ ID NO: 316)
EVQLVESGGGLVKPGGSLRLSCAASGFAFSIYDMSWVRQAPGKGLEWVAYISSGGG
TTYYPDTVKGRFTISRDNAKNSLYLQMSSLRAEDTAMYYCARHSGYGSSYGVLHAY
WGQGTLVTVSS
>Heavy Chain of TRPH-222 IgG histidine scanning variant #42 (SEQ ID NO: 317)
EVQLVESGGGLVKPGGSLRLSCAASGFAFSIYDMSWVRQAPGKGLEWVAYISSGGG
TTYYPDTVKGRFTISRDNAKNSLYLQMSSLRAEDTAMYYCARHSGYGSSYGVLFHY
WGQGTLVTVSS
>Heavy Chain of TRPH-222 IgG histidine scanning variant #43 (SEQ ID NO: 318)
EVQLVESGGGLVKPGGSLRLSCAASGFAFSIYDMSWVRQAPGKGLEWVAYISSGGG
TTYYPDTVKGRFTISRDNAKNSLYLQMSSLRAEDTAMYYCARHSGYGSSYGVLFAH
WGQGTLVTVSS
>Light Chain of TRPH-222 IgG histidine scanning variant #1 (SEQ ID NO: 319)
DIQMTQSPSSLSASVGDRVTITCHASQDISNYLNWYQQKPGKAVKLLIYYTSILHSGV
PSRFSGSGSGTDYTLTISSLQQEDFATYFCQQGNTLPWTFGGGTKVEIK
>Light Chain of TRPH-222 IgG histidine scanning variant #2 (SEQ ID NO: 320)
DIQMTQSPSSLSASVGDRVTITCRHSQDISNYLNWYQQKPGKAVKLLIYYTSILHSGV
PSRFSGSGSGTDYTLTISSLQQEDFATYFCQQGNTLPWTFGGGTKVEIK
>Light Chain of TRPH-222 IgG histidine scanning variant #3 (SEQ ID NO: 321)
DIQMTQSPSSLSASVGDRVTITCRAHQDISNYLNWYQQKPGKAVKLLIYYTSILHSGV
PSRFSGSGSGTDYTLTISSLQQEDFATYFCQQGNTLPWTFGGGTKVEIK
>Light Chain of TRPH-222 IgG histidine scanning variant #4 (SEQ ID NO: 322)
DIQMTQSPSSLSASVGDRVTITCRASHDISNYLNWYQQKPGKAVKLLIYYTSILHSGV
PSRFSGSGSGTDYTLTISSLQQEDFATYFCQQGNTLPWTFGGGTKVEIK
>Light Chain of TRPH-222 IgG histidine scanning variant #5 (SEQ ID NO: 323)
DIQMTQSPSSLSASVGDRVTITCRASQHISNYLNWYQQKPGKAVKLLIYYTSILHSGV
PSRFSGSGSGTDYTLTISSLQQEDFATYFCQQGNTLPWTFGGGTKVEIK
>Light Chain of TRPH-222 IgG histidine scanning variant #6 (SEQ ID NO: 324)
DIQMTQSPSSLSASVGDRVTITCRASQDHSNYLNWYQQKPGKAVKLLIYYTSILHSG
VPSRFSGSGSGTDYTLTISSLQQEDFATYFCQQGNTLPWTFGGGTKVEIK
>Light Chain of TRPH-222 IgG histidine scanning variant #7 (SEQ ID NO: 325)
DIQMTQSPSSLSASVGDRVTITCRASQDIHNYLNWYQQKPGKAVKLLIYYTSILHSGV
PSRFSGSGSGTDYTLTISSLQQEDFATYFCQQGNTLPWTFGGGTKVEIK
>Light Chain of TRPH-222 IgG histidine scanning variant #8 (SEQ ID NO: 326)
DIQMTQSPSSLSASVGDRVTITCRASQDISHYLNWYQQKPGKAVKLLIYYTSILHSGV
PSRFSGSGSGTDYTLTISSLQQEDFATYFCQQGNTLPWTFGGGTKVEIK
>Light Chain of TRPH-222 IgG histidine scanning variant #9 (SEQ ID NO: 327)
DIQMTQSPSSLSASVGDRVTITCRASQDISNHLNWYQQKPGKAVKLLIYYTSILHSGV
PSRFSGSGSGTDYTLTISSLQQEDFATYFCQQGNTLPWTFGGGTKVEIK
>Light Chain of TRPH-222 IgG histidine scanning variant #10 (SEQ ID NO: 328)
DIQMTQSPSSLSASVGDRVTITCRASQDISNYHNWYQQKPGKAVKLLIYYTSILHSGV
PSRFSGSGSGTDYTLTISSLQQEDFATYFCQQGNTLPWTFGGGTKVEIK
>Light Chain of TRPH-222 IgG histidine scanning variant #11 (SEQ ID NO: 329)
DIQMTQSPSSLSASVGDRVTITCRASQDISNYLHWYQQKPGKAVKLLIYYTSILHSGV
PSRFSGSGSGTDYTLTISSLQQEDFATYFCQQGNTLPWTFGGGTKVEIK
>Light Chain of TRPH-222 IgG histidine scanning variant #12 (SEQ ID NO: 330)
DIQMTQSPSSLSASVGDRVTITCRASQDISNYLNWYQQKPGKAVKLLIYHTSILHSGV
PSRFSGSGSGTDYTLTISSLQQEDFATYFCQQGNTLPWTFGGGTKVEIK
>Light Chain of TRPH-222 IgG histidine scanning variant #13 (SEQ ID NO: 331)
DIQMTQSPSSLSASVGDRVTITCRASQDISNYLNWYQQKPGKAVKLLIYYHSILHSGV
PSRFSGSGSGTDYTLTISSLQQEDFATYFCQQGNTLPWTFGGGTKVEIK
>Light Chain of TRPH-222 IgG histidine scanning variant #14 (SEQ ID NO: 332)
DIQMTQSPSSLSASVGDRVTITCRASQDISNYLNWYQQKPGKAVKLLIYYTHILHSGV
PSRFSGSGSGTDYTLTISSLQQEDFATYFCQQGNTLPWTFGGGTKVEIK
>Light Chain of TRPH-222 IgG histidine scanning variant #15 (SEQ ID NO: 333)
DIQMTQSPSSLSASVGDRVTITCRASQDISNYLNWYQQKPGKAVKLLIYYTSHLHSG
VPSRFSGSGSGTDYTLTISSLQQEDFATYFCQQGNTLPWTFGGGTKVEIK
>Light Chain of TRPH-222 IgG histidine scanning variant #16 (SEQ ID NO: 334)
DIQMTQSPSSLSASVGDRVTITCRASQDISNYLNWYQQKPGKAVKLLIYYTSIHHSGV
PSRFSGSGSGTDYTLTISSLQQEDFATYFCQQGNTLPWTFGGGTKVEIK
>Light Chain of TRPH-222 IgG histidine scanning variant #17 (SEQ ID NO: 335)
DIQMTQSPSSLSASVGDRVTITCRASQDISNYLNWYQQKPGKAVKLLIYYTSILASGV
PSRFSGSGSGTDYTLTISSLQQEDFATYFCQQGNTLPWTFGGGTKVEIK
>Light Chain of TRPH-222 IgG histidine scanning variant #18 (SEQ ID NO: 336)
DIQMTQSPSSLSASVGDRVTITCRASQDISNYLNWYQQKPGKAVKLLIYYTSILHHGV
PSRFSGSGSGTDYTLTISSLQQEDFATYFCQQGNTLPWTFGGGTKVEIK
>Light Chain of TRPH-222 IgG histidine scanning variant #19 (SEQ ID NO: 337)
DIQMTQSPSSLSASVGDRVTITCRASQDISNYLNWYQQKPGKAVKLLIYYTSILHSGV
PSRFSGSGSGTDYTLTISSLQQEDFATYFCHQGNTLPWTFGGGTKVEIK
>Light Chain of TRPH-222 IgG histidine scanning variant #20 (SEQ ID NO: 338)
DIQMTQSPSSLSASVGDRVTITCRASQDISNYLNWYQQKPGKAVKLLIYYTSILHSGV
PSRFSGSGSGTDYTLTISSLQQEDFATYFCQHGNTLPWTFGGGTKVEIK
>Light Chain of TRPH-222 IgG histidine scanning variant #21 (SEQ ID NO: 339)
DIQMTQSPSSLSASVGDRVTITCRASQDISNYLNWYQQKPGKAVKLLIYYTSILHSGV
PSRFSGSGSGTDYTLTISSLQQEDFATYFCQQHNTLPWTFGGGTKVEIK
>Light Chain of TRPH-222 IgG histidine scanning variant #22 (SEQ ID NO: 340)
DIQMTQSPSSLSASVGDRVTITCRASQDISNYLNWYQQKPGKAVKLLIYYTSILHSGV
PSRFSGSGSGTDYTLTISSLQQEDFATYFCQQGHTLPWTFGGGTKVEIK
>Light Chain of TRPH-222 IgG histidine scanning variant #23 (SEQ ID NO: 341)
DIQMTQSPSSLSASVGDRVTITCRASQDISNYLNWYQQKPGKAVKLLIYYTSILHSGV
PSRFSGSGSGTDYTLTISSLQQEDFATYFCQQGNHLPWTFGGGTKVEIK
>Light Chain of TRPH-222 IgG histidine scanning variant #24 (SEQ ID NO: 342)
DIQMTQSPSSLSASVGDRVTITCRASQDISNYLNWYQQKPGKAVKLLIYYTSILHSGV
PSRFSGSGSGTDYTLTISSLQQEDFATYFCQQGNTHPWTFGGGTKVEIK
>Light Chain of TRPH-222 IgG histidine scanning variant #25 (SEQ ID NO: 343)
DIQMTQSPSSLSASVGDRVTITCRASQDISNYLNWYQQKPGKAVKLLIYYTSILHSGV
PSRFSGSGSGTDYTLTISSLQQEDFATYFCQQGNTLHWTFGGGTKVEIK
>Light Chain of TRPH-222 IgG histidine scanning variant #26 (SEQ ID NO: 344)
DIQMTQSPSSLSASVGDRVTITCRASQDISNYLNWYQQKPGKAVKLLIYYTSILHSGV
PSRFSGSGSGTDYTLTISSLQQEDFATYFCQQGNTLPHTFGGGTKVEIK
>Light Chain of TRPH-222 IgG histidine scanning variant #27 (SEQ ID NO: 345)
DIQMTQSPSSLSASVGDRVTITCRASQDISNYLNWYQQKPGKAVKLLIYYTSILHSGV
PSRFSGSGSGTDYTLTISSLQQEDFATYFCQQGNTLPWHFGGGTKVEIK
>Heavy Chain Combinations of TRPH-222 IgG histidine scanning variant #1 (SEQ ID NO:
346)
EVQLVESGGGLVKPGGSLRLSCAASGFAFSIHDMSWVRQAPGKGLEWVAYISHGGG
TTYYPDTVKGRFTISRDNAKNSLYLQMSSLRAEDTAMYYCARHSGYGSSYGVLFAY
WGQGTLVTVSS
>Heavy Chain Combinations of TRPH-222 IgG histidine scanning variant #2 (SEQ ID NO:
347)
EVQLVESGGGLVKPGGSLRLSCAASGFAFSIHDMSWVRQAPGKGLEWVAYISSGGG
TTYYPDTVKGRFTISRDNAKNSLYLQMSSLRAEDTAMYYCHRHSGYGSSYGVLFAY
WGQGTLVTVSS
>Heavy Chain Combinations of TRPH-222 IgG histidine scanning variant #3 (SEQ ID NO:
348)
EVQLVESGGGLVKPGGSLRLSCAASGFAFSIHDMSWVRQAPGKGLEWVAYISSGGG
TTYYPDTVKGRFTISRDNAKNSLYLQMSSLRAEDTAMYYCARHHGYGSSYGVLFAY
WGQGTLVTVSS
>Heavy Chain Combinations of TRPH-222 IgG histidine scanning variant #4 (SEQ ID NO:
349)
EVQLVESGGGLVKPGGSLRLSCAASGFAFSIHDMSWVRQAPGKGLEWVAYISSGGG
TTYYPDTVKGRFTISRDNAKNSLYLQMSSLRAEDTAMYYCARHSGYGSSYGVLFHY
WGQGTLVTVSS
>Heavy Chain Combinations of TRPH-222 IgG histidine scanning variant #5 (SEQ ID NO:
350)
EVQLVESGGGLVKPGGSLRLSCAASGFAFSIYDMSWVRQAPGKGLEWVAYISHGGG
TTYYPDTVKGRFTISRDNAKNSLYLQMSSLRAEDTAMYYCHRHSGYGSSYGVLFAY
WGQGTLVTVSS
>Heavy Chain Combinations of TRPH-222 IgG histidine scanning variant #6 (SEQ ID NO:
351)
EVQLVESGGGLVKPGGSLRLSCAASGFAFSIYDMSWVRQAPGKGLEWVAYISHGGG
TTYYPDTVKGRFTISRDNAKNSLYLQMSSLRAEDTAMYYCARHHGYGSSYGVLFAY
WGQGTLVTVSS
>Heavy Chain Combinations of TRPH-222 IgG histidine scanning variant #7 (SEQ ID NO:
352)
EVQLVESGGGLVKPGGSLRLSCAASGFAFSIYDMSWVRQAPGKGLEWVAYISHGGG
TTYYPDTVKGRFTISRDNAKNSLYLQMSSLRAEDTAMYYCARHSGYGSSYGVLFHY
WGQGTLVTVSS
>Heavy Chain Combinations of TRPH-222 IgG histidine scanning variant #8 (SEQ ID NO:
353)
EVQLVESGGGLVKPGGSLRLSCAASGFAFSIYDMSWVRQAPGKGLEWVAYISSGGG
TTYYPDTVKGRFTISRDNAKNSLYLQMSSLRAEDTAMYYCHRHHGYGSSYGVLFAY
WGQGTLVTVSS
>Heavy Chain Combinations of TRPH-222 IgG histidine scanning variant #9 (SEQ ID NO:
354)
EVQLVESGGGLVKPGGSLRLSCAASGFAFSIYDMSWVRQAPGKGLEWVAYISSGGG
TTYYPDTVKGRFTISRDNAKNSLYLQMSSLRAEDTAMYYCHRHSGYGSSYGVLFHY
WGQGTLVTVSS
>Heavy Chain Combinations of TRPH-222 IgG histidine scanning variant #10 (SEQ ID NO:
355)
EVQLVESGGGLVKPGGSLRLSCAASGFAFSIYDMSWVRQAPGKGLEWVAYISSGGG
TTYYPDTVKGRFTISRDNAKNSLYLQMSSLRAEDTAMYYCARHHGYGSSYGVLFHY
WGQGTLVTVSS
>Heavy Chain Combinations of TRPH-222 IgG histidine scanning variant #11 (SEQ ID NO:
356)
EVQLVESGGGLVKPGGSLRLSCAASGFAFSIHDMSWVRQAPGKGLEWVAYISHGGG
TTYYPDTVKGRFTISRDNAKNSLYLQMSSLRAEDTAMYYCHRHSGYGSSYGVLFAY
WGQGTLVTVSS
>Heavy Chain Combinations of TRPH-222 IgG histidine scanning variant #12 (SEQ ID NO:
357)
EVQLVESGGGLVKPGGSLRLSCAASGFAFSIHDMSWVRQAPGKGLEWVAYISHGGG
TTYYPDTVKGRFTISRDNAKNSLYLQMSSLRAEDTAMYYCARHHGYGSSYGVLFAY
WGQGTLVTVSS
>Heavy Chain Combinations of TRPH-222 IgG histidine scanning variant #13 (SEQ ID NO:
358)
EVQLVESGGGLVKPGGSLRLSCAASGFAFSIHDMSWVRQAPGKGLEWVAYISHGGG
TTYYPDTVKGRFTISRDNAKNSLYLQMSSLRAEDTAMYYCARHSGYGSSYGVLFHY
WGQGTLVTVSS
>Heavy Chain Combinations of TRPH-222 IgG histidine scanning variant #14 (SEQ ID NO:
359)
EVQLVESGGGLVKPGGSLRLSCAASGFAFSIHDMSWVRQAPGKGLEWVAYISSGGG
TTYYPDTVKGRFTISRDNAKNSLYLQMSSLRAEDTAMYYCHRHHGYGSSYGVLFAY
WGQGTLVTVSS
>Heavy Chain Combinations of TRPH-222 IgG histidine scanning variant #15 (SEQ ID NO:
360)
EVQLVESGGGLVKPGGSLRLSCAASGFAFSIHDMSWVRQAPGKGLEWVAYISSGGG
TTYYPDTVKGRFTISRDNAKNSLYLQMSSLRAEDTAMYYCHRHSGYGSSYGVLFHY
WGQGTLVTVSS
>Heavy Chain Combinations of TRPH-222 IgG histidine scanning variant #16 (SEQ ID NO:
361)
EVQLVESGGGLVKPGGSLRLSCAASGFAFSIHDMSWVRQAPGKGLEWVAYISSGGG
TTYYPDTVKGRFTISRDNAKNSLYLQMSSLRAEDTAMYYCARHHGYGSSYGVLFHY
WGQGTLVTVSS
>Heavy Chain Combinations of TRPH-222 IgG histidine scanning variant #17 (SEQ ID NO:
362)
EVQLVESGGGLVKPGGSLRLSCAASGFAFSIYDMSWVRQAPGKGLEWVAYISHGGG
TTYYPDTVKGRFTISRDNAKNSLYLQMSSLRAEDTAMYYCHRHHGYGSSYGVLFAY
WGQGTLVTVSS
>Heavy Chain Combinations of TRPH-222 IgG histidine scanning variant #18 (SEQ ID NO:
363)
EVQLVESGGGLVKPGGSLRLSCAASGFAFSIYDMSWVRQAPGKGLEWVAYISHGGG
TTYYPDTVKGRFTISRDNAKNSLYLQMSSLRAEDTAMYYCHRHSGYGSSYGVLFHY
WGQGTLVTVSS
>Heavy Chain Combinations of TRPH-222 IgG histidine scanning variant #19 (SEQ ID NO:
364)
EVQLVESGGGLVKPGGSLRLSCAASGFAFSIYDMSWVRQAPGKGLEWVAYISHGGG
TTYYPDTVKGRFTISRDNAKNSLYLQMSSLRAEDTAMYYCARHHGYGSSYGVLFHY
WGQGTLVTVSS
>Heavy Chain Combinations of TRPH-222 IgG histidine scanning variant #20 (SEQ ID NO:
365)
EVQLVESGGGLVKPGGSLRLSCAASGFAFSIYDMSWVRQAPGKGLEWVAYISSGGG
TTYYPDTVKGRFTISRDNAKNSLYLQMSSLRAEDTAMYYCHRHHGYGSSYGVLFHY
WGQGTLVTVSS
>Heavy Chain of ADCT-602 IgG (SEQ ID NO: 366)
QVQLVQSGAEVKKPGSSVKVSCKASGYTFTSYWLHWVRQAPGQGLEWIGYINPRN
DYTEYNQNFKDKATITADESTNTAYMELSSLRSEDTAFYFCARRDITTFYWGQGTTV
TVSS
>Light Chain of ADCT-602 IgG (SEQ ID NO: 367)
DIQLTQSPSSLSASVGDRVTMSCKSSQSVLYSANHKNYLAWYQQKPGKAPKLLIYW
ASTRESGVPSRFSGSGSGTDFTFTISSLQPEDIATYYCHQYLSSWTFGGGTKVQIK
>Heavy Chain CDR1 of ADCT-602 (SEQ ID NO: 368)
GYTFTSYWLH
>Heavy Chain CDR2 of ADCT-602 (SEQ ID NO: 369)
YINPRNDYTEYNQNFKD
>Heavy Chain CDR3 of ADCT-602 (SEQ ID NO: 370)
ARRDITTFY
>Light Chain CDR1 of ADCT-602 (SEQ ID NO: 371)
KSSQSVLYSANHKNYLA
>Light Chain CDR2 of ADCT-602 (SEQ ID NO: 372)
WASTRES
>Light Chain CDR3 of ADCT-602 (SEQ ID NO: 373)
HQYLSSWT
>Heavy Chain of ADCT-602 IgG histidine scanning variant #1 (SEQ ID NO: 374)
QVQLVQSGAEVKKPGSSVKVSCKASHYTFTSYWLHWVRQAPGQGLEWIGYINPRN
DYTEYNQNFKDKATITADESTNTAYMELSSLRSEDTAFYFCARRDITTFYWGQGTTV
TVSS
>Heavy Chain of ADCT-602 IgG histidine scanning variant #2 (SEQ ID NO: 375)
QVQLVQSGAEVKKPGSSVKVSCKASGHTFTSYWLHWVRQAPGQGLEWIGYINPRN
DYTEYNQNFKDKATITADESTNTAYMELSSLRSEDTAFYFCARRDITTFYWGQGTTV
TVSS
>Heavy Chain of ADCT-602 IgG histidine scanning variant #3 (SEQ ID NO: 376)
QVQLVQSGAEVKKPGSSVKVSCKASGYHFTSYWLHWVRQAPGQGLEWIGYINPRN
DYTEYNQNFKDKATITADESTNTAYMELSSLRSEDTAFYFCARRDITTFYWGQGTTV
TVSS
>Heavy Chain of ADCT-602 IgG histidine scanning variant #4 (SEQ ID NO: 377)
QVQLVQSGAEVKKPGSSVKVSCKASGYTHTSYWLHWVRQAPGQGLEWIGYINPRN
DYTEYNQNFKDKATITADESTNTAYMELSSLRSEDTAFYFCARRDITTFYWGQGTTV
TVSS
>Heavy Chain of ADCT-602 IgG histidine scanning variant #5 (SEQ ID NO: 378)
QVQLVQSGAEVKKPGSSVKVSCKASGYTFHSYWLHWVRQAPGQGLEWIGYINPRN
DYTEYNQNFKDKATITADESTNTAYMELSSLRSEDTAFYFCARRDITTFYWGQGTTV
TVSS
>Heavy Chain of ADCT-602 IgG histidine scanning variant #6 (SEQ ID NO: 379)
QVQLVQSGAEVKKPGSSVKVSCKASGYTFTHYWLHWVRQAPGQGLEWIGYINPRN
DYTEYNQNFKDKATITADESTNTAYMELSSLRSEDTAFYFCARRDITTFYWGQGTTV
TVSS
>Heavy Chain of ADCT-602 IgG histidine scanning variant #7 (SEQ ID NO: 380)
QVQLVQSGAEVKKPGSSVKVSCKASGYTFTSHWLHWVRQAPGQGLEWIGYINPRN
DYTEYNQNFKDKATITADESTNTAYMELSSLRSEDTAFYFCARRDITTFYWGQGTTV
TVSS
>Heavy Chain of ADCT-602 IgG histidine scanning variant #8 (SEQ ID NO: 381)
QVQLVQSGAEVKKPGSSVKVSCKASGYTFTSYHLHWVRQAPGQGLEWIGYINPRND
YTEYNQNFKDKATITADESTNTAYMELSSLRSEDTAFYFCARRDITTFYWGQGTTVT
VSS
>Heavy Chain of ADCT-602 IgG histidine scanning variant #9 (SEQ ID NO: 382)
QVQLVQSGAEVKKPGSSVKVSCKASGYTFTSYWHHWVRQAPGQGLEWIGYINPRN
DYTEYNQNFKDKATITADESTNTAYMELSSLRSEDTAFYFCARRDITTFYWGQGTTV
TVSS
>Heavy Chain of ADCT-602 IgG histidine scanning variant #10 (SEQ ID NO: 383)
QVQLVQSGAEVKKPGSSVKVSCKASGYTFTSYWLAWVRQAPGQGLEWIGYINPRN
DYTEYNQNFKDKATITADESTNTAYMELSSLRSEDTAFYFCARRDITTFYWGQGTTV
TVSS
>Heavy Chain of ADCT-602 IgG histidine scanning variant #11 (SEQ ID NO: 384)
QVQLVQSGAEVKKPGSSVKVSCKASGYTFTSYWLHWVRQAPGQGLEWIGHINPRN
DYTEYNQNFKDKATITADESTNTAYMELSSLRSEDTAFYFCARRDITTFYWGQGTTV
TVSS
>Heavy Chain of ADCT-602 IgG histidine scanning variant #12 (SEQ ID NO: 385)
QVQLVQSGAEVKKPGSSVKVSCKASGYTFTSYWLHWVRQAPGQGLEWIGYHNPRN
DYTEYNQNFKDKATITADESTNTAYMELSSLRSEDTAFYFCARRDITTFYWGQGTTV
TVSS
>Heavy Chain of ADCT-602 IgG histidine scanning variant #13 (SEQ ID NO: 386)
QVQLVQSGAEVKKPGSSVKVSCKASGYTFTSYWLHWVRQAPGQGLEWIGYIHPRN
DYTEYNQNFKDKATITADESTNTAYMELSSLRSEDTAFYFCARRDITTFYWGQGTTV
TVSS
>Heavy Chain of ADCT-602 IgG histidine scanning variant #14 (SEQ ID NO: 387)
QVQLVQSGAEVKKPGSSVKVSCKASGYTFTSYWLHWVRQAPGQGLEWIGYINHRN
DYTEYNQNFKDKATITADESTNTAYMELSSLRSEDTAFYFCARRDITTFYWGQGTTV
TVSS
>Heavy Chain of ADCT-602 IgG histidine scanning variant #15 (SEQ ID NO: 388)
QVQLVQSGAEVKKPGSSVKVSCKASGYTFTSYWLHWVRQAPGQGLEWIGYINPHN
DYTEYNQNFKDKATITADESTNTAYMELSSLRSEDTAFYFCARRDITTFYWGQGTTV
TVSS
>Heavy Chain of ADCT-602 IgG histidine scanning variant #16 (SEQ ID NO: 389)
QVQLVQSGAEVKKPGSSVKVSCKASGYTFTSYWLHWVRQAPGQGLEWIGYINPRH
DYTEYNQNFKDKATITADESTNTAYMELSSLRSEDTAFYFCARRDITTFYWGQGTTV
TVSS
>Heavy Chain of ADCT-602 IgG histidine scanning variant #17 (SEQ ID NO: 390)
QVQLVQSGAEVKKPGSSVKVSCKASGYTFTSYWLHWVRQAPGQGLEWIGYINPRN
HYTEYNQNFKDKATITADESTNTAYMELSSLRSEDTAFYFCARRDITTFYWGQGTTV
TVSS
>Heavy Chain of ADCT-602 IgG histidine scanning variant #18 (SEQ ID NO: 391)
QVQLVQSGAEVKKPGSSVKVSCKASGYTFTSYWLHWVRQAPGQGLEWIGYINPRN
DHTEYNQNFKDKATITADESTNTAYMELSSLRSEDTAFYFCARRDITTFYWGQGTTV
TVSS
>Heavy Chain of ADCT-602 IgG histidine scanning variant #19 (SEQ ID NO: 392)
QVQLVQSGAEVKKPGSSVKVSCKASGYTFTSYWLHWVRQAPGQGLEWIGYINPRN
DYHEYNQNFKDKATITADESTNTAYMELSSLRSEDTAFYFCARRDITTFYWGQGTTV
TVSS
>Heavy Chain of ADCT-602 IgG histidine scanning variant #20 (SEQ ID NO: 393)
QVQLVQSGAEVKKPGSSVKVSCKASGYTFTSYWLHWVRQAPGQGLEWIGYINPRN
DYTHYNQNFKDKATITADESTNTAYMELSSLRSEDTAFYFCARRDITTFYWGQGTTV
TVSS
>Heavy Chain of ADCT-602 IgG histidine scanning variant #21 (SEQ ID NO: 394)
QVQLVQSGAEVKKPGSSVKVSCKASGYTFTSYWLHWVRQAPGQGLEWIGYINPRN
DYTEHNQNFKDKATITADESTNTAYMELSSLRSEDTAFYFCARRDITTFYWGQGTTV
TVSS
>Heavy Chain of ADCT-602 IgG histidine scanning variant #22 (SEQ ID NO: 395)
QVQLVQSGAEVKKPGSSVKVSCKASGYTFTSYWLHWVRQAPGQGLEWIGYINPRN
DYTEYHQNFKDKATITADESTNTAYMELSSLRSEDTAFYFCARRDITTFYWGQGTTV
TVSS
>Heavy Chain of ADCT-602 IgG histidine scanning variant #23 (SEQ ID NO: 396)
QVQLVQSGAEVKKPGSSVKVSCKASGYTFTSYWLHWVRQAPGQGLEWIGYINPRN
DYTEYNHNFKDKATITADESTNTAYMELSSLRSEDTAFYFCARRDITTFYWGQGTTV
TVSS
>Heavy Chain of ADCT-602 IgG histidine scanning variant #24 (SEQ ID NO: 397)
QVQLVQSGAEVKKPGSSVKVSCKASGYTFTSYWLHWVRQAPGQGLEWIGYINPRN
DYTEYNQHFKDKATITADESTNTAYMELSSLRSEDTAFYFCARRDITTFYWGQGTTV
TVSS
>Heavy Chain of ADCT-602 IgG histidine scanning variant #25 (SEQ ID NO: 398)
QVQLVQSGAEVKKPGSSVKVSCKASGYTFTSYWLHWVRQAPGQGLEWIGYINPRN
DYTEYNQNHKDKATITADESTNTAYMELSSLRSEDTAFYFCARRDITTFYWGQGTT
VTVSS
>Heavy Chain of ADCT-602 IgG histidine scanning variant #26 (SEQ ID NO: 399)
QVQLVQSGAEVKKPGSSVKVSCKASGYTFTSYWLHWVRQAPGQGLEWIGYINPRN
DYTEYNQNFHDKATITADESTNTAYMELSSLRSEDTAFYFCARRDITTFYWGQGTTV
TVSS
>Heavy Chain of ADCT-602 IgG histidine scanning variant #27 (SEQ ID NO: 400)
QVQLVQSGAEVKKPGSSVKVSCKASGYTFTSYWLHWVRQAPGQGLEWIGYINPRN
DYTEYNQNFKHKATITADESTNTAYMELSSLRSEDTAFYFCARRDITTFYWGQGTTV
TVSS
>Heavy Chain of ADCT-602 IgG histidine scanning variant #28 (SEQ ID NO: 401)
QVQLVQSGAEVKKPGSSVKVSCKASGYTFTSYWLHWVRQAPGQGLEWIGYINPRN
DYTEYNQNFKDKATITADESTNTAYMELSSLRSEDTAFYFCHRRDITTFYWGQGTTV
TVSS
>Heavy Chain of ADCT-602 IgG histidine scanning variant #29 (SEQ ID NO: 402)
QVQLVQSGAEVKKPGSSVKVSCKASGYTFTSYWLHWVRQAPGQGLEWIGYINPRN
DYTEYNQNFKDKATITADESTNTAYMELSSLRSEDTAFYFCAHRDITTFYWGQGTTV
TVSS
>Heavy Chain of ADCT-602 IgG histidine scanning variant #30 (SEQ ID NO: 403)
QVQLVQSGAEVKKPGSSVKVSCKASGYTFTSYWLHWVRQAPGQGLEWIGYINPRN
DYTEYNQNFKDKATITADESTNTAYMELSSLRSEDTAFYFCARHDITTFYWGQGTTV
TVSS
>Heavy Chain of ADCT-602 IgG histidine scanning variant #31 (SEQ ID NO: 404)
QVQLVQSGAEVKKPGSSVKVSCKASGYTFTSYWLHWVRQAPGQGLEWIGYINPRN
DYTEYNQNFKDKATITADESTNTAYMELSSLRSEDTAFYFCARRHITTFYWGQGTTV
TVSS
>Heavy Chain of ADCT-602 IgG histidine scanning variant #32 (SEQ ID NO: 405)
QVQLVQSGAEVKKPGSSVKVSCKASGYTFTSYWLHWVRQAPGQGLEWIGYINPRN
DYTEYNQNFKDKATITADESTNTAYMELSSLRSEDTAFYFCARRDHTTFYWGQGTT
VTVSS
>Heavy Chain of ADCT-602 IgG histidine scanning variant #33 (SEQ ID NO: 406)
QVQLVQSGAEVKKPGSSVKVSCKASGYTFTSYWLHWVRQAPGQGLEWIGYINPRN
DYTEYNQNFKDKATITADESTNTAYMELSSLRSEDTAFYFCARRDIHTFYWGQGTTV
TVSS
>Heavy Chain of ADCT-602 IgG histidine scanning variant #34 (SEQ ID NO: 407)
QVQLVQSGAEVKKPGSSVKVSCKASGYTFTSYWLHWVRQAPGQGLEWIGYINPRN
DYTEYNQNFKDKATITADESTNTAYMELSSLRSEDTAFYFCARRDITHFYWGQGTTV
TVSS
>Heavy Chain of ADCT-602 IgG histidine scanning variant #35 (SEQ ID NO: 408)
QVQLVQSGAEVKKPGSSVKVSCKASGYTFTSYWLHWVRQAPGQGLEWIGYINPRN
DYTEYNQNFKDKATITADESTNTAYMELSSLRSEDTAFYFCARRDITTHYWGQGTT
VTVSS
>Heavy Chain of ADCT-602 IgG histidine scanning variant #36 (SEQ ID NO: 409)
QVQLVQSGAEVKKPGSSVKVSCKASGYTFTSYWLHWVRQAPGQGLEWIGYINPRN
DYTEYNQNFKDKATITADESTNTAYMELSSLRSEDTAFYFCARRDITTFHWGQGTTV
TVSS
>Heavy Chain of 12C5 IgG (SEQ ID NO: 410)
QVQLVQSGSELKKPGASVKVSCKASGYTFTSYAMNWVRQAPGQGLEWMGWINTN
TGNPTYAQGFTGRFVFSLDTSVSTAYLQISSLKAEDTAVYYCARLFYYYFGMDVWG
QGTTVTVSS
>Light Chain of 12C5 IgG (SEQ ID NO: 411)
QSALTQPASVSGSPGQSITISCTGTSSDVGSYNLVSWYQLHPGKAPKLMIYEVSKRPS
GVSNRFSGSRSGNTASLTISGLQAEDEADYYCCSYANSSTLVFGGGTKLTVL
>Heavy Chain CDR1 of 12C5 (SEQ ID NO: 412)
KASGYTFTSYAMN
>Heavy Chain CDR2 of 12C5 (SEQ ID NO: 413)
WINTNTGNPTYAQGFTG
>Heavy Chain CDR3 of 12C5 (SEQ ID NO: 414)
LFYYYFGMDV
>Light Chain CDR1 of 12C5 (SEQ ID NO: 415)
TGTSSDVGSYNLVS
>Light Chain CDR2 of 12C5 (SEQ ID NO: 416)
EVSKRPS
>Light Chain CDR3 of 12C5 (SEQ ID NO: 417)
CSYANSSTL
>Heavy Chain of 12C5 IgG histidine scanning variant #1 (SEQ ID NO: 418)
QVQLVQSGSELKKPGASVKVSCHASGYTFTSYAMNWVRQAPGQGLEWMGWINTN
TGNPTYAQGFTGRFVFSLDTSVSTAYLQISSLKAEDTAVYYCARLFYYYFGMDVWG
QGTTVTVSS
>Heavy Chain of 12C5 IgG histidine scanning variant #2 (SEQ ID NO: 419)
QVQLVQSGSELKKPGASVKVSCKHSGYTFTSYAMNWVRQAPGQGLEWMGWINTN
TGNPTYAQGFTGRFVFSLDTSVSTAYLQISSLKAEDTAVYYCARLFYYYFGMDVWG
QGTTVTVSS
>Heavy Chain of 12C5 IgG histidine scanning variant #3 (SEQ ID NO: 420)
QVQLVQSGSELKKPGASVKVSCKAHGYTFTSYAMNWVRQAPGQGLEWMGWINTN
TGNPTYAQGFTGRFVFSLDTSVSTAYLQISSLKAEDTAVYYCARLFYYYFGMDVWG
QGTTVTVSS
>Heavy Chain of 12C5 IgG histidine scanning variant #4 (SEQ ID NO: 421)
QVQLVQSGSELKKPGASVKVSCKASHYTFTSYAMNWVRQAPGQGLEWMGWINTN
TGNPTYAQGFTGRFVFSLDTSVSTAYLQISSLKAEDTAVYYCARLFYYYFGMDVWG
QGTTVTVSS
>Heavy Chain of 12C5 IgG histidine scanning variant #5 (SEQ ID NO: 422)
QVQLVQSGSELKKPGASVKVSCKASGHTFTSYAMNWVRQAPGQGLEWMGWINTN
TGNPTYAQGFTGRFVFSLDTSVSTAYLQISSLKAEDTAVYYCARLFYYYFGMDVWG
QGTTVTVSS
>Heavy Chain of 12C5 IgG histidine scanning variant #6 (SEQ ID NO: 423)
QVQLVQSGSELKKPGASVKVSCKASGYHFTSYAMNWVRQAPGQGLEWMGWINTN
TGNPTYAQGFTGRFVFSLDTSVSTAYLQISSLKAEDTAVYYCARLFYYYFGMDVWG
QGTTVTVSS
>Heavy Chain of 12C5 IgG histidine scanning variant #7 (SEQ ID NO: 424)
QVQLVQSGSELKKPGASVKVSCKASGYTHTSYAMNWVRQAPGQGLEWMGWINTN
TGNPTYAQGFTGRFVFSLDTSVSTAYLQISSLKAEDTAVYYCARLFYYYFGMDVWG
QGTTVTVSS
>Heavy Chain of 12C5 IgG histidine scanning variant #8 (SEQ ID NO: 425)
QVQLVQSGSELKKPGASVKVSCKASGYTFHSYAMNWVRQAPGQGLEWMGWINTN
TGNPTYAQGFTGRFVFSLDTSVSTAYLQISSLKAEDTAVYYCARLFYYYFGMDVWG
QGTTVTVSS
>Heavy Chain of 12C5 IgG histidine scanning variant #9 (SEQ ID NO: 426)
QVQLVQSGSELKKPGASVKVSCKASGYTFTHYAMNWVRQAPGQGLEWMGWINTN
TGNPTYAQGFTGRFVFSLDTSVSTAYLQISSLKAEDTAVYYCARLFYYYFGMDVWG
QGTTVTVSS
>Heavy Chain of 12C5 IgG histidine scanning variant #10 (SEQ ID NO: 427)
QVQLVQSGSELKKPGASVKVSCKASGYTFTSHAMNWVRQAPGQGLEWMGWINTN
TGNPTYAQGFTGRFVFSLDTSVSTAYLQISSLKAEDTAVYYCARLFYYYFGMDVWG
QGTTVTVSS
>Heavy Chain of 12C5 IgG histidine scanning variant #11 (SEQ ID NO: 428)
QVQLVQSGSELKKPGASVKVSCKASGYTFTSYHMNWVRQAPGQGLEWMGWINTN
TGNPTYAQGFTGRFVFSLDTSVSTAYLQISSLKAEDTAVYYCARLFYYYFGMDVWG
QGTTVTVSS
>Heavy Chain of 12C5 IgG histidine scanning variant #12 (SEQ ID NO: 429)
QVQLVQSGSELKKPGASVKVSCKASGYTFTSYAHNWVRQAPGQGLEWMGWINTNT
GNPTYAQGFTGRFVFSLDTSVSTAYLQISSLKAEDTAVYYCARLFYYYFGMDVWGQ
GTTVTVSS
>Heavy Chain of 12C5 IgG histidine scanning variant #13 (SEQ ID NO: 430)
QVQLVQSGSELKKPGASVKVSCKASGYTFTSYAMHWVRQAPGQGLEWMGWINTN
TGNPTYAQGFTGRFVFSLDTSVSTAYLQISSLKAEDTAVYYCARLFYYYFGMDVWG
QGTTVTVSS
>Heavy Chain of 12C5 IgG histidine scanning variant #14 (SEQ ID NO: 431)
QVQLVQSGSELKKPGASVKVSCKASGYTFTSYAMNWVRQAPGQGLEWMGHINTNT
GNPTYAQGFTGRFVFSLDTSVSTAYLQISSLKAEDTAVYYCARLFYYYFGMDVWGQ
GTTVTVSS
>Heavy Chain of 12C5 IgG histidine scanning variant #15 (SEQ ID NO: 432)
QVQLVQSGSELKKPGASVKVSCKASGYTFTSYAMNWVRQAPGQGLEWMGWHNTN
TGNPTYAQGFTGRFVFSLDTSVSTAYLQISSLKAEDTAVYYCARLFYYYFGMDVWG
QGTTVTVSS
>Heavy Chain of 12C5 IgG histidine scanning variant #16 (SEQ ID NO: 433)
QVQLVQSGSELKKPGASVKVSCKASGYTFTSYAMNWVRQAPGQGLEWMGWIHTN
TGNPTYAQGFTGRFVFSLDTSVSTAYLQISSLKAEDTAVYYCARLFYYYFGMDVWG
QGTTVTVSS
>Heavy Chain of 12C5 IgG histidine scanning variant #17 (SEQ ID NO: 434)
QVQLVQSGSELKKPGASVKVSCKASGYTFTSYAMNWVRQAPGQGLEWMGWINHN
TGNPTYAQGFTGRFVFSLDTSVSTAYLQISSLKAEDTAVYYCARLFYYYFGMDVWG
QGTTVTVSS
>Heavy Chain of 12C5 IgG histidine scanning variant #18 (SEQ ID NO: 435)
QVQLVQSGSELKKPGASVKVSCKASGYTFTSYAMNWVRQAPGQGLEWMGWINTH
TGNPTYAQGFTGRFVFSLDTSVSTAYLQISSLKAEDTAVYYCARLFYYYFGMDVWG
QGTTVTVSS
>Heavy Chain of 12C5 IgG histidine scanning variant #19 (SEQ ID NO: 436)
QVQLVQSGSELKKPGASVKVSCKASGYTFTSYAMNWVRQAPGQGLEWMGWINTN
HGNPTYAQGFTGRFVFSLDTSVSTAYLQISSLKAEDTAVYYCARLFYYYFGMDVWG
QGTTVTVSS
>Heavy Chain of 12C5 IgG histidine scanning variant #20 (SEQ ID NO: 437)
QVQLVQSGSELKKPGASVKVSCKASGYTFTSYAMNWVRQAPGQGLEWMGWINTN
THNPTYAQGFTGRFVFSLDTSVSTAYLQISSLKAEDTAVYYCARLFYYYFGMDVWG
QGTTVTVSS
>Heavy Chain of 12C5 IgG histidine scanning variant #21 (SEQ ID NO: 438)
QVQLVQSGSELKKPGASVKVSCKASGYTFTSYAMNWVRQAPGQGLEWMGWINTN
TGHPTYAQGFTGRFVFSLDTSVSTAYLQISSLKAEDTAVYYCARLFYYYFGMDVWG
QGTTVTVSS
>Heavy Chain of 12C5 IgG histidine scanning variant #22 (SEQ ID NO: 439)
QVQLVQSGSELKKPGASVKVSCKASGYTFTSYAMNWVRQAPGQGLEWMGWINTN
TGNHTYAQGFTGRFVFSLDTSVSTAYLQISSLKAEDTAVYYCARLFYYYFGMDVWG
QGTTVTVSS
>Heavy Chain of 12C5 IgG histidine scanning variant #23 (SEQ ID NO: 440)
QVQLVQSGSELKKPGASVKVSCKASGYTFTSYAMNWVRQAPGQGLEWMGWINTN
TGNPHYAQGFTGRFVFSLDTSVSTAYLQISSLKAEDTAVYYCARLFYYYFGMDVWG
QGTTVTVSS
>Heavy Chain of 12C5 IgG histidine scanning variant #24 (SEQ ID NO: 441)
QVQLVQSGSELKKPGASVKVSCKASGYTFTSYAMNWVRQAPGQGLEWMGWINTN
TGNPTHAQGFTGRFVFSLDTSVSTAYLQISSLKAEDTAVYYCARLFYYYFGMDVWG
QGTTVTVSS
>Heavy Chain of 12C5 IgG histidine scanning variant #25 (SEQ ID NO: 442)
QVQLVQSGSELKKPGASVKVSCKASGYTFTSYAMNWVRQAPGQGLEWMGWINTN
TGNPTYHQGFTGRFVFSLDTSVSTAYLQISSLKAEDTAVYYCARLFYYYFGMDVWG
QGTTVTVSS
>Heavy Chain of 12C5 IgG histidine scanning variant #26 (SEQ ID NO: 443)
QVQLVQSGSELKKPGASVKVSCKASGYTFTSYAMNWVRQAPGQGLEWMGWINTN
TGNPTYAHGFTGRFVFSLDTSVSTAYLQISSLKAEDTAVYYCARLFYYYFGMDVWG
QGTTVTVSS
>Heavy Chain of 12C5 IgG histidine scanning variant #27 (SEQ ID NO: 444)
QVQLVQSGSELKKPGASVKVSCKASGYTFTSYAMNWVRQAPGQGLEWMGWINTN
TGNPTYAQHFTGRFVFSLDTSVSTAYLQISSLKAEDTAVYYCARLFYYYFGMDVWG
QGTTVTVSS
>Heavy Chain of 12C5 IgG histidine scanning variant #28 (SEQ ID NO: 445)
QVQLVQSGSELKKPGASVKVSCKASGYTFTSYAMNWVRQAPGQGLEWMGWINTN
TGNPTYAQGHTGRFVFSLDTSVSTAYLQISSLKAEDTAVYYCARLFYYYFGMDVWG
QGTTVTVSS
>Heavy Chain of 12C5 IgG histidine scanning variant #29 (SEQ ID NO: 446)
QVQLVQSGSELKKPGASVKVSCKASGYTFTSYAMNWVRQAPGQGLEWMGWINTN
TGNPTYAQGFHGRFVFSLDTSVSTAYLQISSLKAEDTAVYYCARLFYYYFGMDVWG
QGTTVTVSS
>Heavy Chain of 12C5 IgG histidine scanning variant #30 (SEQ ID NO: 447)
QVQLVQSGSELKKPGASVKVSCKASGYTFTSYAMNWVRQAPGQGLEWMGWINTN
TGNPTYAQGFTHRFVFSLDTSVSTAYLQISSLKAEDTAVYYCARLFYYYFGMDVWG
QGTTVTVSS
>Heavy Chain of 12C5 IgG histidine scanning variant #31 (SEQ ID NO: 448)
QVQLVQSGSELKKPGASVKVSCKASGYTFTSYAMNWVRQAPGQGLEWMGWINTN
TGNPTYAQGFTGRFVFSLDTSVSTAYLQISSLKAEDTAVYYCARHFYYYFGMDVWG
QGTTVTVSS
>Heavy Chain of 12C5 IgG histidine scanning variant #32 (SEQ ID NO: 449)
QVQLVQSGSELKKPGASVKVSCKASGYTFTSYAMNWVRQAPGQGLEWMGWINTN
TGNPTYAQGFTGRFVFSLDTSVSTAYLQISSLKAEDTAVYYCARLHYYYFGMDVWG
QGTTVTVSS
>Heavy Chain of 12C5 IgG histidine scanning variant #33 (SEQ ID NO: 450)
QVQLVQSGSELKKPGASVKVSCKASGYTFTSYAMNWVRQAPGQGLEWMGWINTN
TGNPTYAQGFTGRFVFSLDTSVSTAYLQISSLKAEDTAVYYCARLFHYYFGMDVWG
QGTTVTVSS
>Heavy Chain of 12C5 IgG histidine scanning variant #34 (SEQ ID NO: 451)
QVQLVQSGSELKKPGASVKVSCKASGYTFTSYAMNWVRQAPGQGLEWMGWINTN
TGNPTYAQGFTGRFVFSLDTSVSTAYLQISSLKAEDTAVYYCARLFYHYFGMDVWG
QGTTVTVSS
>Heavy Chain of 12C5 IgG histidine scanning variant #35 (SEQ ID NO: 452)
QVQLVQSGSELKKPGASVKVSCKASGYTFTSYAMNWVRQAPGQGLEWMGWINTN
TGNPTYAQGFTGRFVFSLDTSVSTAYLQISSLKAEDTAVYYCARLFYYHFGMDVWG
QGTTVTVSS
>Heavy Chain of 12C5 IgG histidine scanning variant #36 (SEQ ID NO: 453)
QVQLVQSGSELKKPGASVKVSCKASGYTFTSYAMNWVRQAPGQGLEWMGWINTN
TGNPTYAQGFTGRFVFSLDTSVSTAYLQISSLKAEDTAVYYCARLFYYYHGMDVWG
QGTTVTVSS
>Heavy Chain of 12C5 IgG histidine scanning variant #37 (SEQ ID NO: 454)
QVQLVQSGSELKKPGASVKVSCKASGYTFTSYAMNWVRQAPGQGLEWMGWINTN
TGNPTYAQGFTGRFVFSLDTSVSTAYLQISSLKAEDTAVYYCARLFYYYFHMDVWG
QGTTVTVSS
>Heavy Chain of 12C5 IgG histidine scanning variant #38 (SEQ ID NO: 455)
QVQLVQSGSELKKPGASVKVSCKASGYTFTSYAMNWVRQAPGQGLEWMGWINTN
TGNPTYAQGFTGRFVFSLDTSVSTAYLQISSLKAEDTAVYYCARLFYYYFGHDVWG
QGTTVTVSS
>Heavy Chain of 12C5 IgG histidine scanning variant #39 (SEQ ID NO: 456)
QVQLVQSGSELKKPGASVKVSCKASGYTFTSYAMNWVRQAPGQGLEWMGWINTN
TGNPTYAQGFTGRFVFSLDTSVSTAYLQISSLKAEDTAVYYCARLFYYYFGMHVWG
QGTTVTVSS
>Heavy Chain of 12C5 IgG histidine scanning variant #40 (SEQ ID NO: 457)
QVQLVQSGSELKKPGA SVKVSCKASGYTFTSYAMNWVRQAPGQGLEWMGWINTN
TGNPTYAQGFTGRFVFSLDTSVSTAYLQISSLKAEDTAVYYCARLFYYYFGMDHWG
QGTTVTVSS
>Light Chain of 12C5 IgG histidine scanning variant #1 (SEQ ID NO: 458)
QSALTQPASVSGSPGQSITISCHGTSSDVGSYNLVSWYQLHPGKAPKLMIYEVSKRPS
GVSNRFSGSRSGNTASLTISGLQAEDEADYYCCSYANSSTLVFGGGTKLTVL
>Light Chain of 12C5 IgG histidine scanning variant #2 (SEQ ID NO: 459)
QSALTQPASVSGSPGQSITISCTHTSSDVGSYNLVSWYQLHPGKAPKLMIYEVSKRPS
GVSNRFSGSRSGNTASLTISGLQAEDEADYYCCSYANSSTLVFGGGTKLTVL
>Light Chain of 12C5 IgG histidine scanning variant #3 (SEQ ID NO: 460)
QSALTQPASVSGSPGQSITISCTGHSSDVGSYNLVSWYQLHPGKAPKLMIYEVSKRPS
GVSNRFSGSRSGNTASLTISGLQAEDEADYYCCSYANSSTLVFGGGTKLTVL
>Light Chain of 12C5 IgG histidine scanning variant #4 (SEQ ID NO: 461)
QSALTQPASVSGSPGQSITISCTGTHSDVGSYNLVSWYQLHPGKAPKLMIYEVSKRPS
GVSNRFSGSRSGNTASLTISGLQAEDEADYYCCSYANSSTLVFGGGTKLTVL
>Light Chain of 12C5 IgG histidine scanning variant #5 (SEQ ID NO: 462)
QSALTQPASVSGSPGQSITISCTGTSHDVGSYNLVSWYQLHPGKAPKLMIYEVSKRPS
GVSNRFSGSRSGNTASLTISGLQAEDEADYYCCSYANSSTLVFGGGTKLTVL
>Light Chain of 12C5 IgG histidine scanning variant #6 (SEQ ID NO: 463)
QSALTQPASVSGSPGQSITISCTGTSSHVGSYNLVSWYQLHPGKAPKLMIYEVSKRPS
GVSNRFSGSRSGNTASLTISGLQAEDEADYYCCSYANSSTLVFGGGTKLTVL
>Light Chain of 12C5 IgG histidine scanning variant #7 (SEQ ID NO: 464)
QSALTQPASVSGSPGQSITISCTGTSSDHGSYNLVSWYQLHPGKAPKLMIYEVSKRPS
GVSNRFSGSRSGNTASLTISGLQAEDEADYYCCSYANSSTLVFGGGTKLTVL
>Light Chain of 12C5 IgG histidine scanning variant #8 (SEQ ID NO: 465)
QSALTQPASVSGSPGQSITISCTGTSSDVHSYNLVSWYQLHPGKAPKLMIYEVSKRPS
GVSNRFSGSRSGNTASLTISGLQAEDEADYYCCSYANSSTLVFGGGTKLTVL
>Light Chain of 12C5 IgG histidine scanning variant #9 (SEQ ID NO: 466)
QSALTQPASVSGSPGQSITISCTGTSSDVGHYNLVSWYQLHPGKAPKLMIYEVSKRPS
GVSNRFSGSRSGNTASLTISGLQAEDEADYYCCSYANSSTLVFGGGTKLTVL
>Light Chain of 12C5 IgG histidine scanning variant #10 (SEQ ID NO: 467)
QSALTQPASVSGSPGQSITISCTGTSSDVGSHNLVSWYQLHPGKAPKLMIYEVSKRPS
GVSNRFSGSRSGNTASLTISGLQAEDEADYYCCSYANSSTLVFGGGTKLTVL
>Light Chain of 12C5 IgG histidine scanning variant #11 (SEQ ID NO: 468)
QSALTQPASVSGSPGQSITISCTGTSSDVGSYHLVSWYQLHPGKAPKLMIYEVSKRPS
GVSNRFSGSRSGNTASLTISGLQAEDEADYYCCSYANSSTLVFGGGTKLTVL
>Light Chain of 12C5 IgG histidine scanning variant #12 (SEQ ID NO: 469)
QSALTQPASVSGSPGQSITISCTGTSSDVGSYNHVSWYQLHPGKAPKLMIYEVSKRPS
GVSNRFSGSRSGNTASLTISGLQAEDEADYYCCSYANSSTLVFGGGTKLTVL
>Light Chain of 12C5 IgG histidine scanning variant #13 (SEQ ID NO: 470)
QSALTQPASVSGSPGQSITISCTGTSSDVGSYNLHSWYQLHPGKAPKLMIYEVSKRPS
GVSNRFSGSRSGNTASLTISGLQAEDEADYYCCSYANSSTLVFGGGTKLTVL
>Light Chain of 12C5 IgG histidine scanning variant #14 (SEQ ID NO: 471)
QSALTQPASVSGSPGQSITISCTGTSSDVGSYNLVHWYQLHPGKAPKLMIYEVSKRPS
GVSNRFSGSRSGNTASLTISGLQAEDEADYYCCSYANSSTLVFGGGTKLTVL
>Light Chain of 12C5 IgG histidine scanning variant #15 (SEQ ID NO: 472)
QSALTQPASVSGSPGQSITISCTGTSSDVGSYNLVSWYQLHPGKAPKLMIYHVSKRPS
GVSNRFSGSRSGNTASLTISGLQAEDEADYYCCSYANSSTLVFGGGTKLTVL
>Light Chain of 12C5 IgG histidine scanning variant #16 (SEQ ID NO: 473)
QSALTQPASVSGSPGQSITISCTGTSSDVGSYNLVSWYQLHPGKAPKLMIYEHSKRPS
GVSNRFSGSRSGNTASLTISGLQAEDEADYYCCSYANSSTLVFGGGTKLTVL
>Light Chain of 12C5 IgG histidine scanning variant #17 (SEQ ID NO: 474)
QSALTQPASVSGSPGQSITISCTGTSSDVGSYNLVSWYQLHPGKAPKLMIYEVHKRPS
GVSNRFSGSRSGNTASLTISGLQAEDEADYYCCSYANSSTLVFGGGTKLTVL
>Light Chain of 12C5 IgG histidine scanning variant #18 (SEQ ID NO: 475)
QSALTQPASVSGSPGQSITISCTGTSSDVGSYNLVSWYQLHPGKAPKLMIYEVSHRPS
GVSNRFSGSRSGNTASLTISGLQAEDEADYYCCSYANSSTLVFGGGTKLTVL
>Light Chain of 12C5 IgG histidine scanning variant #19 (SEQ ID NO: 476)
QSALTQPASVSGSPGQSITISCTGTSSDVGSYNLVSWYQLHPGKAPKLMIYEVSKHPS
GVSNRFSGSRSGNTASLTISGLQAEDEADYYCCSYANSSTLVFGGGTKLTVL
>Light Chain of 12C5 IgG histidine scanning variant #20 (SEQ ID NO: 477)
QSALTQPASVSGSPGQSITISCTGTSSDVGSYNLVSWYQLHPGKAPKLMIYEVSKRHS
GVSNRFSGSRSGNTASLTISGLQAEDEADYYCCSYANSSTLVFGGGTKLTVL
>Light Chain of 12C5 IgG histidine scanning variant #21 (SEQ ID NO: 478)
QSALTQPASVSGSPGQSITISCTGTSSDVGSYNLVSWYQLHPGKAPKLMIYEVSKRPH
GVSNRFSGSRSGNTASLTISGLQAEDEADYYCCSYANSSTLVFGGGTKLTVL
>Light Chain of 12C5 IgG histidine scanning variant #22 (SEQ ID NO: 479)
QSALTQPASVSGSPGQSITISCTGTSSDVGSYNLVSWYQLHPGKAPKLMIYEVSKRPS
GVSNRFSGSRSGNTASLTISGLQAEDEADYYCHSYANSSTLVFGGGTKLTVL
>Light Chain of 12C5 IgG histidine scanning variant #23 (SEQ ID NO: 480)
QSALTQPASVSGSPGQSITISCTGTSSDVGSYNLVSWYQLHPGKAPKLMIYEVSKRPS
GVSNRFSGSRSGNTASLTISGLQAEDEADYYCCHYANSSTLVFGGGTKLTVL
>Light Chain of 12C5 IgG histidine scanning variant #24 (SEQ ID NO: 481)
QSALTQPASVSGSPGQSITISCTGTSSDVGSYNLVSWYQLHPGKAPKLMIYEVSKRPS
GVSNRFSGSRSGNTASLTISGLQAEDEADYYCCSHANSSTLVFGGGTKLTVL
>Light Chain of 12C5 IgG histidine scanning variant #25 (SEQ ID NO: 482)
QSALTQPASVSGSPGQSITISCTGTSSDVGSYNLVSWYQLHPGKAPKLMIYEVSKRPS
GVSNRFSGSRSGNTASLTISGLQAEDEADYYCCSYHNSSTLVFGGGTKLTVL
>Light Chain of 12C5 IgG histidine scanning variant #26 (SEQ ID NO: 483)
QSALTQPASVSGSPGQSITISCTGTSSDVGSYNLVSWYQLHPGKAPKLMIYEVSKRPS
GVSNRFSGSRSGNTASLTISGLQAEDEADYYCCSYAHSSTLVFGGGTKLTVL
>Light Chain of 12C5 IgG histidine scanning variant #27 (SEQ ID NO: 484)
QSALTQPASVSGSPGQSITISCTGTSSDVGSYNLVSWYQLHPGKAPKLMIYEVSKRPS
GVSNRFSGSRSGNTASLTISGLQAEDEADYYCCSYANHSTLVFGGGTKLTVL
>Light Chain of 12C5 IgG histidine scanning variant #28 (SEQ ID NO: 485)
QSALTQPASVSGSPGQSITISCTGTSSDVGSYNLVSWYQLHPGKAPKLMIYEVSKRPS
GVSNRFSGSRSGNTASLTISGLQAEDEADYYCCSYANSHTLVFGGGTKLTVL
>Light Chain of 12C5 IgG histidine scanning variant #29 (SEQ ID NO: 486)
QSALTQPASVSGSPGQSITISCTGTSSDVGSYNLVSWYQLHPGKAPKLMIYEVSKRPS
GVSNRFSGSRSGNTASLTISGLQAEDEADYYCCSYANSSHLVFGGGTKLTVL
>Light Chain of 12C5 IgG histidine scanning variant #30 (SEQ ID NO: 487)
QSALTQPASVSGSPGQSITISCTGTSSDVGSYNLVSWYQLHPGKAPKLMIYEVSKRPS
GVSNRFSGSRSGNTASLTISGLQAEDEADYYCCSYANSSTHVFGGGTKLTVL
>Light Chain of 12C5 IgG histidine scanning variant #31 (SEQ ID NO: 488)
QSALTQPASVSGSPGQSITISCTGTSSDVGSYNLVSWYQLHPGKAPKLMIYEVSKRPS
GVSNRFSGSRSGNTASLTISGLQAEDEADYYCCSYANSSTLHFGGGTKLTVL
>Heavy Chain of 19A3 IgG (SEQ ID NO: 489)
QVQLQQWGAGLLKPSETLSLTCAVYGRSFSSYYWSWIRQPPGKGLEWIGDIQHSGST
NYNPSLKSRVTISVDTSKNQFSLKLSSVTAADTAVYYCAGTFYDILTGYYPLGYWGP
GTLVTVSS
>Light Chain of 19A3 IgG (SEQ ID NO: 490)
EIVLTQSPATLSLSPGERATLSCRASQSVSSYLAWYQQKPGQAPRLLIYDASNRATGI
PARFSGSGSGTDFTLTISSLEPEDFAVYYCQQRSNWPTFGQGTKVEIK
>Heavy Chain CDR1 of 19A3 (SEQ ID NO: 491)
AVYGRSFSSYYWS
>Heavy Chain CDR2 of 19A3 (SEQ ID NO: 492)
DIQHSGSTNYNPSLKS
>Heavy Chain CDR3 of 19A3 (SEQ ID NO: 493)
AGTFYDILTGYYPLGY
>Light Chain CDR1 of 19A3 (SEQ ID NO: 494)
RASQSVSSYLA
>Light Chain CDR2 of 19A3 (SEQ ID NO: 495)
DASNRAT
>Light Chain CDR3 of 19A3 (SEQ ID NO: 496)
QQRSNWP
>Heavy Chain of 19A3 IgG histidine scanning variant #1 (SEQ ID NO: 497)
QVQLQQWGAGLLKPSETLSLTCHVYGRSFSSYYWSWIRQPPGKGLEWIGDIQHSGST
NYNPSLKSRVTISVDTSKNQFSLKLSSVTAADTAVYYCAGTFYDILTGYYPLGYWGP
GTLVTVSS
>Heavy Chain of 19A3 IgG histidine scanning variant #2 (SEQ ID NO: 498)
QVQLQQWGAGLLKPSETLSLTCAHYGRSFSSYYWSWIRQPPGKGLEWIGDIQHSGST
NYNPSLKSRVTISVDTSKNQFSLKLSSVTAADTAVYYCAGTFYDILTGYYPLGYWGP
GTLVTVSS
>Heavy Chain of 19A3 IgG histidine scanning variant #3 (SEQ ID NO: 499)
QVQLQQWGAGLLKPSETLSLTCAVHGRSFSSYYWSWIRQPPGKGLEWIGDIQHSGST
NYNPSLKSRVTISVDTSKNQFSLKLSSVTAADTAVYYCAGTFYDILTGYYPLGYWGP
GTLVTVSS
>Heavy Chain of 19A3 IgG histidine scanning variant #4 (SEQ ID NO: 500)
QVQLQQWGAGLLKPSETLSLTCAVYHRSFSSYYWSWIRQPPGKGLEWIGDIQHSGST
NYNPSLKSRVTISVDTSKNQFSLKLSSVTAADTAVYYCAGTFYDILTGYYPLGYWGP
GTLVTVSS
>Heavy Chain of 19A3 IgG histidine scanning variant #5 (SEQ ID NO: 501)
QVQLQQWGAGLLKPSETLSLTCAVYGHSFSSYYWSWIRQPPGKGLEWIGDIQHSGST
NYNPSLKSRVTISVDTSKNQFSLKLSSVTAADTAVYYCAGTFYDILTGYYPLGYWGP
GTLVTVSS
>Heavy Chain of 19A3 IgG histidine scanning variant #6 (SEQ ID NO: 502)
QVQLQQWGAGLLKPSETLSLTCAVYGRHFSSYYWSWIRQPPGKGLEWIGDIQHSGS
TNYNPSLKSRVTISVDTSKNQFSLKLSSVTAADTAVYYCAGTFYDILTGYYPLGYWG
PGTLVTVSS
>Heavy Chain of 19A3 IgG histidine scanning variant #7 (SEQ ID NO: 503)
QVQLQQWGAGLLKPSETLSLTCAVYGRSHSSYYWSWIRQPPGKGLEWIGDIQHSGS
TNYNPSLKSRVTISVDTSKNQFSLKLSSVTAADTAVYYCAGTFYDILTGYYPLGYWG
PGTLVTVSS
>Heavy Chain of 19A3 IgG histidine scanning variant #8 (SEQ ID NO: 504)
QVQLQQWGAGLLKPSETLSLTCAVYGRSFHSYYWSWIRQPPGKGLEWIGDIQHSGS
TNYNPSLKSRVTISVDTSKNQFSLKLSSVTAADTAVYYCAGTFYDILTGYYPLGYWG
PGTLVTVSS
>Heavy Chain of 19A3 IgG histidine scanning variant #9 (SEQ ID NO: 505)
QVQLQQWGAGLLKPSETLSLTCAVYGRSFSHYYWSWIRQPPGKGLEWIGDIQHSGS
TNYNPSLKSRVTISVDTSKNQFSLKLSSVTAADTAVYYCAGTFYDILTGYYPLGYWG
PGTLVTVSS
>Heavy Chain of 19A3 IgG histidine scanning variant #10 (SEQ ID NO: 506)
QVQLQQWGAGLLKPSETLSLTCAVYGRSFSSHYWSWIRQPPGKGLEWIGDIQHSGST
NYNPSLKSRVTISVDTSKNQFSLKLSSVTAADTAVYYCAGTFYDILTGYYPLGYWGP
GTLVTVSS
>Heavy Chain of 19A3 IgG histidine scanning variant #11 (SEQ ID NO: 507)
QVQLQQWGAGLLKPSETLSLTCAVYGRSFSSYHWSWIRQPPGKGLEWIGDIQHSGST
NYNPSLKSRVTISVDTSKNQFSLKLSSVTAADTAVYYCAGTFYDILTGYYPLGYWGP
GTLVTVSS
>Heavy Chain of 19A3 IgG histidine scanning variant #12 (SEQ ID NO: 508)
QVQLQQWGAGLLKPSETLSLTCAVYGRSFSSYYHSWIRQPPGKGLEWIGDIQHSGST
NYNPSLKSRVTISVDTSKNQFSLKLSSVTAADTAVYYCAGTFYDILTGYYPLGYWGP
GTLVTVSS
>Heavy Chain of 19A3 IgG histidine scanning variant #13 (SEQ ID NO: 509)
QVQLQQWGAGLLKPSETLSLTCAVYGRSFSSYYWHWIRQPPGKGLEWIGDIQHSGS
TNYNPSLKSRVTISVDTSKNQFSLKLSSVTAADTAVYYCAGTFYDILTGYYPLGYWG
PGTLVTVSS
>Heavy Chain of 19A3 IgG histidine scanning variant #14 (SEQ ID NO: 510)
QVQLQQWGAGLLKPSETLSLTCAVYGRSFSSYYWSWIRQPPGKGLEWIGHIQHSGST
NYNPSLKSRVTISVDTSKNQFSLKLSSVTAADTAVYYCAGTFYDILTGYYPLGYWGP
GTLVTVSS
>Heavy Chain of 19A3 IgG histidine scanning variant #15 (SEQ ID NO: 511)
QVQLQQWGAGLLKPSETLSLTCAVYGRSFSSYYWSWIRQPPGKGLEWIGDHQHSGS
TNYNPSLKSRVTISVDTSKNQFSLKLSSVTAADTAVYYCAGTFYDILTGYYPLGYWG
PGTLVTVSS
>Heavy Chain of 19A3 IgG histidine scanning variant #16 (SEQ ID NO: 512)
QVQLQQWGAGLLKPSETLSLTCAVYGRSFSSYYWSWIRQPPGKGLEWIGDIHHSGST
NYNPSLKSRVTISVDTSKNQFSLKLSSVTAADTAVYYCAGTFYDILTGYYPLGYWGP
GTLVTVSS
>Heavy Chain of 19A3 IgG histidine scanning variant #17 (SEQ ID NO: 513)
QVQLQQWGAGLLKPSETLSLTCAVYGRSFSSYYWSWIRQPPGKGLEWIGDIQASGST
NYNPSLKSRVTISVDTSKNQFSLKLSSVTAADTAVYYCAGTFYDILTGYYPLGYWGP
GTLVTVSS
>Heavy Chain of 19A3 IgG histidine scanning variant #18 (SEQ ID NO: 514)
QVQLQQWGAGLLKPSETLSLTCAVYGRSFSSYYWSWIRQPPGKGLEWIGDIQHHGS
TNYNPSLKSRVTISVDTSKNQFSLKLSSVTAADTAVYYCAGTFYDILTGYYPLGYWG
PGTLVTVSS
>Heavy Chain of 19A3 IgG histidine scanning variant #19 (SEQ ID NO: 515)
QVQLQQWGAGLLKPSETLSLTCAVYGRSFSSYYWSWIRQPPGKGLEWIGDIQHSHST
NYNPSLKSRVTISVDTSKNQFSLKLSSVTAADTAVYYCAGTFYDILTGYYPLGYWGP
GTLVTVSS
>Heavy Chain of 19A3 IgG histidine scanning variant #20 (SEQ ID NO: 516)
QVQLQQWGAGLLKPSETLSLTCAVYGRSFSSYYWSWIRQPPGKGLEWIGDIQHSGH
TNYNPSLKSRVTISVDTSKNQFSLKLSSVTAADTAVYYCAGTFYDILTGYYPLGYWG
PGTLVTVSS
>Heavy Chain of 19A3 IgG histidine scanning variant #21 (SEQ ID NO: 517)
QVQLQQWGAGLLKPSETLSLTCAVYGRSFSSYYWSWIRQPPGKGLEWIGDIQHSGS
HNYNPSLKSRVTISVDTSKNQFSLKLSSVTAADTAVYYCAGTFYDILTGYYPLGYWG
PGTLVTVSS
>Heavy Chain of 19A3 IgG histidine scanning variant #22 (SEQ ID NO: 518)
QVQLQQWGAGLLKPSETLSLTCAVYGRSFSSYYWSWIRQPPGKGLEWIGDIQHSGST
HYNPSLKSRVTISVDTSKNQFSLKLSSVTAADTAVYYCAGTFYDILTGYYPLGYWGP
GTLVTVSS
>Heavy Chain of 19A3 IgG histidine scanning variant #23 (SEQ ID NO: 519)
QVQLQQWGAGLLKPSETLSLTCAVYGRSFSSYYWSWIRQPPGKGLEWIGDIQHSGST
NHNPSLKSRVTISVDTSKNQFSLKLSSVTAADTAVYYCAGTFYDILTGYYPLGYWGP
GTLVTVSS
>Heavy Chain of 19A3 IgG histidine scanning variant #24 (SEQ ID NO: 520)
QVQLQQWGAGLLKPSETLSLTCAVYGRSFSSYYWSWIRQPPGKGLEWIGDIQHSGST
NYHPSLKSRVTISVDTSKNQFSLKLSSVTAADTAVYYCAGTFYDILTGYYPLGYWGP
GTLVTVSS
>Heavy Chain of 19A3 IgG histidine scanning variant #25 (SEQ ID NO: 521)
QVQLQQWGAGLLKPSETLSLTCAVYGRSFSSYYWSWIRQPPGKGLEWIGDIQHSGST
NYNHSLKSRVTISVDTSKNQFSLKLSSVTAADTAVYYCAGTFYDILTGYYPLGYWGP
GTLVTVSS
>Heavy Chain of 19A3 IgG histidine scanning variant #26 (SEQ ID NO: 522)
QVQLQQWGAGLLKPSETLSLTCAVYGRSFSSYYWSWIRQPPGKGLEWIGDIQHSGST
NYNPHLKSRVTISVDTSKNQFSLKLSSVTAADTAVYYCAGTFYDILTGYYPLGYWGP
GTLVTVSS
>Heavy Chain of 19A3 IgG histidine scanning variant #27 (SEQ ID NO: 523)
QVQLQQWGAGLLKPSETLSLTCAVYGRSFSSYYWSWIRQPPGKGLEWIGDIQHSGST
NYNPSHKSRVTISVDTSKNQFSLKLSSVTAADTAVYYCAGTFYDILTGYYPLGYWGP
GTLVTVSS
>Heavy Chain of 19A3 IgG histidine scanning variant #28 (SEQ ID NO: 524)
QVQLQQWGAGLLKPSETLSLTCAVYGRSFSSYYWSWIRQPPGKGLEWIGDIQHSGST
NYNPSLHSRVTISVDTSKNQFSLKLSSVTAADTAVYYCAGTFYDILTGYYPLGYWGP
GTLVTVSS
>Heavy Chain of 19A3 IgG histidine scanning variant #29 (SEQ ID NO: 525)
QVQLQQWGAGLLKPSETLSLTCAVYGRSFSSYYWSWIRQPPGKGLEWIGDIQHSGST
NYNPSLKHRVTISVDTSKNQFSLKLSSVTAADTAVYYCAGTFYDILTGYYPLGYWGP
GTLVTVSS
>Heavy Chain of 19A3 IgG histidine scanning variant #30 (SEQ ID NO: 526)
QVQLQQWGAGLLKPSETLSLTCAVYGRSFSSYYWSWIRQPPGKGLEWIGDIQHSGST
NYNPSLKSRVTISVDTSKNQFSLKLSSVTAADTAVYYCHGTFYDILTGYYPLGYWGP
GTLVTVSS
>Heavy Chain of 19A3 IgG histidine scanning variant #31 (SEQ ID NO: 527)
QVQLQQWGAGLLKPSETLSLTCAVYGRSFSSYYWSWIRQPPGKGLEWIGDIQHSGST
NYNPSLKSRVTISVDTSKNQFSLKLSSVTAADTAVYYCAHTFYDILTGYYPLGYWGP
GTLVTVSS
>Heavy Chain of 19A3 IgG histidine scanning variant #32 (SEQ ID NO: 528)
QVQLQQWGAGLLKPSETLSLTCAVYGRSFSSYYWSWIRQPPGKGLEWIGDIQHSGST
NYNPSLKSRVTISVDTSKNQFSLKLSSVTAADTAVYYCAGHFYDILTGYYPLGYWGP
GTLVTVSS
>Heavy Chain of 19A3 IgG histidine scanning variant #33 (SEQ ID NO: 529)
QVQLQQWGAGLLKPSETLSLTCAVYGRSFSSYYWSWIRQPPGKGLEWIGDIQHSGST
NYNPSLKSRVTISVDTSKNQFSLKLSSVTAADTAVYYCAGTHYDILTGYYPLGYWGP
GTLVTVSS
>Heavy Chain of 19A3 IgG histidine scanning variant #34 (SEQ ID NO: 530)
QVQLQQWGAGLLKPSETLSLTCAVYGRSFSSYYWSWIRQPPGKGLEWIGDIQHSGST
NYNPSLKSRVTISVDTSKNQFSLKLSSVTAADTAVYYCAGTFHDILTGYYPLGYWGP
GTLVTVSS
>Heavy Chain of 19A3 IgG histidine scanning variant #35 (SEQ ID NO: 531)
QVQLQQWGAGLLKPSETLSLTCAVYGRSFSSYYWSWIRQPPGKGLEWIGDIQHSGST
NYNPSLKSRVTISVDTSKNQFSLKLSSVTAADTAVYYCAGTFYHILTGYYPLGYWGP
GTLVTVSS
>Heavy Chain of 19A3 IgG histidine scanning variant #36 (SEQ ID NO: 532)
QVQLQQWGAGLLKPSETLSLTCAVYGRSFSSYYWSWIRQPPGKGLEWIGDIQHSGST
NYNPSLKSRVTISVDTSKNQFSLKLSSVTAADTAVYYCAGTFYDHLTGYYPLGYWG
PGTLVTVSS
>Heavy Chain of 19A3 IgG histidine scanning variant #37 (SEQ ID NO: 533)
QVQLQQWGAGLLKPSETLSLTCAVYGRSFSSYYWSWIRQPPGKGLEWIGDIQHSGST
NYNPSLKSRVTISVDTSKNQFSLKLSSVTAADTAVYYCAGTFYDIHTGYYPLGYWGP
GTLVTVSS
>Heavy Chain of 19A3 IgG histidine scanning variant #38 (SEQ ID NO: 534)
QVQLQQWGAGLLKPSETLSLTCAVYGRSFSSYYWSWIRQPPGKGLEWIGDIQHSGST
NYNPSLKSRVTISVDTSKNQFSLKLSSVTAADTAVYYCAGTFYDILHGYYPLGYWGP
GTLVTVSS
>Heavy Chain of 19A3 IgG histidine scanning variant #39 (SEQ ID NO: 535)
QVQLQQWGAGLLKPSETLSLTCAVYGRSFSSYYWSWIRQPPGKGLEWIGDIQHSGST
NYNPSLKSRVTISVDTSKNQFSLKLSSVTAADTAVYYCAGTFYDILTHYYPLGYWGP
GTLVTVSS
>Heavy Chain of 19A3 IgG histidine scanning variant #40 (SEQ ID NO: 536)
QVQLQQWGAGLLKPSETLSLTCAVYGRSFSSYYWSWIRQPPGKGLEWIGDIQHSGST
NYNPSLKSRVTISVDTSKNQFSLKLSSVTAADTAVYYCAGTFYDILTGHYPLGYWGP
GTLVTVSS
>Heavy Chain of 19A3 IgG histidine scanning variant #41 (SEQ ID NO: 537)
QVQLQQWGAGLLKPSETLSLTCAVYGRSFSSYYWSWIRQPPGKGLEWIGDIQHSGST
NYNPSLKSRVTISVDTSKNQFSLKLSSVTAADTAVYYCAGTFYDILTGYHPLGYWGP
GTLVTVSS
>Heavy Chain of 19A3 IgG histidine scanning variant #42 (SEQ ID NO: 538)
QVQLQQWGAGLLKPSETLSLTCAVYGRSFSSYYWSWIRQPPGKGLEWIGDIQHSGST
NYNPSLKSRVTISVDTSKNQFSLKLSSVTAADTAVYYCAGTFYDILTGYYHLGYWGP
GTLVTVSS
>Heavy Chain of 19A3 IgG histidine scanning variant #43 (SEQ ID NO: 539)
QVQLQQWGAGLLKPSETLSLTCAVYGRSFSSYYWSWIRQPPGKGLEWIGDIQHSGST
NYNPSLKSRVTISVDTSKNQFSLKLSSVTAADTAVYYCAGTFYDILTGYYPHGYWGP
GTLVTVSS
>Heavy Chain of 19A3 IgG histidine scanning variant #44 (SEQ ID NO: 540)
QVQLQQWGAGLLKPSETLSLTCAVYGRSFSSYYWSWIRQPPGKGLEWIGDIQHSGST
NYNPSLKSRVTISVDTSKNQFSLKLSSVTAADTAVYYCAGTFYDILTGYYPLHYWGP
GTLVTVSS
>Heavy Chain of 19A3 IgG histidine scanning variant #45 (SEQ ID NO: 541)
QVQLQQWGAGLLKPSETLSLTCAVYGRSFSSYYWSWIRQPPGKGLEWIGDIQHSGST
NYNPSLKSRVTISVDTSKNQFSLKLSSVTAADTAVYYCAGTFYDILTGYYPLGHWGP
GTLVTVSS
>Light Chain of 19A3 IgG histidine scanning variant #1 (SEQ ID NO: 542)
EIVLTQSPATLSLSPGERATLSCHASQSVSSYLAWYQQKPGQAPRLLIYDASNRATGI
PARFSGSGSGTDFTLTISSLEPEDFAVYYCQQRSNWPTFGQGTKVEIK
>Light Chain of 19A3 IgG histidine scanning variant #2 (SEQ ID NO: 543)
EIVLTQSPATLSLSPGERATLSCRHSQSVSSYLAWYQQKPGQAPRLLIYDASNRATGI
PARFSGSGSGTDFTLTISSLEPEDFAVYYCQQRSNWPTFGQGTKVEIK
>Light Chain of 19A3 IgG histidine scanning variant #3 (SEQ ID NO: 544)
EIVLTQSPATLSLSPGERATLSCRAHQSVSSYLAWYQQKPGQAPRLLIYDASNRATGI
PARFSGSGSGTDFTLTISSLEPEDFAVYYCQQRSNWPTFGQGTKVEIK
>Light Chain of 19A3 IgG histidine scanning variant #4 (SEQ ID NO: 545)
EIVLTQSPATLSLSPGERATLSCRASHSVSSYLAWYQQKPGQAPRLLIYDASNRATGI
PARFSGSGSGTDFTLTISSLEPEDFAVYYCQQRSNWPTFGQGTKVEIK
>Light Chain of 19A3 IgG histidine scanning variant #5 (SEQ ID NO: 546)
EIVLTQSPATLSLSPGERATLSCRASQHVSSYLAWYQQKPGQAPRLLIYDASNRATGI
PARFSGSGSGTDFTLTISSLEPEDFAVYYCQQRSNWPTFGQGTKVEIK
>Light Chain of 19A3 IgG histidine scanning variant #6 (SEQ ID NO: 547)
EIVLTQSPATLSLSPGERATLSCRASQSHSSYLAWYQQKPGQAPRLLIYDASNRATGI
PARFSGSGSGTDFTLTISSLEPEDFAVYYCQQRSNWPTFGQGTKVEIK
>Light Chain of 19A3 IgG histidine scanning variant #7 (SEQ ID NO: 548)
EIVLTQSPATLSLSPGERATLSCRASQSVHSYLAWYQQKPGQAPRLLIYDASNRATGI
PARFSGSGSGTDFTLTISSLEPEDFAVYYCQQRSNWPTFGQGTKVEIK
>Light Chain of 19A3 IgG histidine scanning variant #8 (SEQ ID NO: 549)
EIVLTQSPATLSLSPGERATLSCRASQSVSHYLAWYQQKPGQAPRLLIYDASNRATGI
PARFSGSGSGTDFTLTISSLEPEDFAVYYCQQRSNWPTFGQGTKVEIK
>Light Chain of 19A3 IgG histidine scanning variant #9 (SEQ ID NO: 550)
EIVLTQSPATLSLSPGERATLSCRASQSVSSHLAWYQQKPGQAPRLLIYDASNRATGI
PARFSGSGSGTDFTLTISSLEPEDFAVYYCQQRSNWPTFGQGTKVEIK
>Light Chain of 19A3 IgG histidine scanning variant #10 (SEQ ID NO: 551)
EIVLTQSPATLSLSPGERATLSCRASQSVSSYHAWYQQKPGQAPRLLIYDASNRATGI
PARFSGSGSGTDFTLTISSLEPEDFAVYYCQQRSNWPTFGQGTKVEIK
>Light Chain of 19A3 IgG histidine scanning variant #11 (SEQ ID NO: 552)
EIVLTQSPATLSLSPGERATLSCRASQSVSSYLHWYQQKPGQAPRLLIYDASNRATGI
PARFSGSGSGTDFTLTISSLEPEDFAVYYCQQRSNWPTFGQGTKVEIK
>Light Chain of 19A3 IgG histidine scanning variant #12 (SEQ ID NO: 553)
EIVLTQSPATLSLSPGERATLSCRASQSVSSYLAWYQQKPGQAPRLLIYHASNRATGI
PARFSGSGSGTDFTLTISSLEPEDFAVYYCQQRSNWPTFGQGTKVEIK
>Light Chain of 19A3 IgG histidine scanning variant #13 (SEQ ID NO: 554)
EIVLTQSPATLSLSPGERATLSCRASQSVSSYLAWYQQKPGQAPRLLIYDHSNRATGI
PARFSGSGSGTDFTLTISSLEPEDFAVYYCQQRSNWPTFGQGTKVEIK
>Light Chain of 19A3 IgG histidine scanning variant #14 (SEQ ID NO: 555)
EIVLTQSPATLSLSPGERATLSCRASQSVSSYLAWYQQKPGQAPRLLIYDAHNRATGI
PARFSGSGSGTDFTLTISSLEPEDFAVYYCQQRSNWPTFGQGTKVEIK
>Light Chain of 19A3 IgG histidine scanning variant #15 (SEQ ID NO: 556)
EIVLTQSPATLSLSPGERATLSCRASQSVSSYLAWYQQKPGQAPRLLIYDASHRATGI
PARFSGSGSGTDFTLTISSLEPEDFAVYYCQQRSNWPTFGQGTKVEIK
>Light Chain of 19A3 IgG histidine scanning variant #16 (SEQ ID NO: 557)
EIVLTQSPATLSLSPGERATLSCRASQSVSSYLAWYQQKPGQAPRLLIYDASNHATGI
PARFSGSGSGTDFTLTISSLEPEDFAVYYCQQRSNWPTFGQGTKVEIK
>Light Chain of 19A3 IgG histidine scanning variant #17 (SEQ ID NO: 558)
EIVLTQSPATLSLSPGERATLSCRASQSVSSYLAWYQQKPGQAPRLLIYDASNRHTGI
PARFSGSGSGTDFTLTISSLEPEDFAVYYCQQRSNWPTFGQGTKVEIK
>Light Chain of 19A3 IgG histidine scanning variant #18 (SEQ ID NO: 559)
EIVLTQSPATLSLSPGERATLSCRASQSVSSYLAWYQQKPGQAPRLLIYDASNRAHGI
PARFSGSGSGTDFTLTISSLEPEDFAVYYCQQRSNWPTFGQGTKVEIK
>Light Chain of 19A3 IgG histidine scanning variant #19 (SEQ ID NO: 560)
EIVLTQSPATLSLSPGERATLSCRASQSVSSYLAWYQQKPGQAPRLLIYDASNRATGI
PARFSGSGSGTDFTLTISSLEPEDFAVYYCHQRSNWPTFGQGTKVEIK
>Light Chain of 19A3 IgG histidine scanning variant #20 (SEQ ID NO: 561)
EIVLTQSPATLSLSPGERATLSCRASQSVSSYLAWYQQKPGQAPRLLIYDASNRATGI
PARFSGSGSGTDFTLTISSLEPEDFAVYYCQHRSNWPTFGQGTKVEIK
>Light Chain of 19A3 IgG histidine scanning variant #21 (SEQ ID NO: 562)
EIVLTQSPATLSLSPGERATLSCRASQSVSSYLAWYQQKPGQAPRLLIYDASNRATGI
PARFSGSGSGTDFTLTISSLEPEDFAVYYCQQHSNWPTFGQGTKVEIK
>Light Chain of 19A3 IgG histidine scanning variant #22 (SEQ ID NO: 563)
EIVLTQSPATLSLSPGERATLSCRASQSVSSYLAWYQQKPGQAPRLLIYDASNRATGI
PARFSGSGSGTDFTLTISSLEPEDFAVYYCQQRHNWPTFGQGTKVEIK
>Light Chain of 19A3 IgG histidine scanning variant #23 (SEQ ID NO: 564)
EIVLTQSPATLSLSPGERATLSCRASQSVSSYLAWYQQKPGQAPRLLIYDASNRATGI
PARFSGSGSGTDFTLTISSLEPEDFAVYYCQQRSHWPTFGQGTKVEIK
>Light Chain of 19A3 IgG histidine scanning variant #24 (SEQ ID NO: 565)
EIVLTQSPATLSLSPGERATLSCRASQSVSSYLAWYQQKPGQAPRLLIYDASNRATGI
PARFSGSGSGTDFTLTISSLEPEDFAVYYCQQRSNHPTFGQGTKVEIK
>Light Chain of 19A3 IgG histidine scanning variant #25 (SEQ ID NO: 566)
EIVLTQSPATLSLSPGERATLSCRASQSVSSYLAWYQQKPGQAPRLLIYDASNRATGI
PARFSGSGSGTDFTLTISSLEPEDFAVYYCQQRSNWHTFGQGTKVEIK
>Light Chain of 19A3 IgG histidine scanning variant #26 (SEQ ID NO: 567)
EIVLTQSPATLSLSPGERATLSCRASQSVSSYLAWYQQKPGQAPRLLIYDASNRATGI
PARFSGSGSGTDFTLTISSLEPEDFAVYYCQQRSNWPHFGQGTKVEIK

The application's sequence listing, which the Patent Office published only in electronic form, follows.

SEQUENCE LISTING (567 sequences)

SEQ ID NO: 1 - protein, 121 aa, Artificial Sequence
  source: /note="Description of Artificial Sequence: Synthetic polypeptide"
  source: /note="Heavy Chain of Inotuzumab IgG"
EVQLVQSGAEVKKPGASVKVSCKASGYRFTNYWIHWVRQAPGQGLEWIGGINPGNNYATYRRKFQGRVTMTADTSTSTVYMELSSLRSEDTAVYYCTREGYGNYGAWFAYWGQGTLVTVSS

SEQ ID NO: 2 - protein, 112 aa, Artificial Sequence
  source: /note="Description of Artificial Sequence: Synthetic polypeptide"
  source: /note="Light Chain of Inotuzumab IgG"
DVQVTQSPSSLSASVGDRVTITCRSSQSLANSYGNTFLSWYLHKPGKAPQLLIYGISNRFSGVPDRFSGSGSGTDFTLTISSLQPEDFATYYCLQGTHQPYTFGQGTKVEIK

SEQ ID NO: 3 - protein, 10 aa, Artificial Sequence
  source: /note="Description of Artificial Sequence: Synthetic peptide"
  source: /note="Heavy Chain CDR1 of Inotuzumab"
GYRFTNYWIH

SEQ ID NO: 4 - protein, 15 aa, Artificial Sequence
  source: /note="Description of Artificial Sequence: Synthetic peptide"
  source: /note="Heavy Chain CDR2 of Inotuzumab"
GINPGNNYATYRRKF

SEQ ID NO: 5 - protein, 14 aa, Artificial Sequence
  source: /note="Description of Artificial Sequence: Synthetic peptide"
  source: /note="Heavy Chain CDR3 of Inotuzumab"
TREGYGNYGAWFAY

SEQ ID NO: 6 - protein, 16 aa, Artificial Sequence
  source: /note="Description of Artificial Sequence: Synthetic peptide"
  source: /note="Light Chain CDR1 of Inotuzumab"
RSSQSLANSYGNTFLS

SEQ ID NO: 7 - protein, 7 aa, Artificial Sequence
  source: /note="Description of Artificial Sequence: Synthetic peptide"
  source: /note="Light Chain CDR2 of Inotuzumab"
GISNRFS

SEQ ID NO: 8 - protein, 9 aa, Artificial Sequence
  source: /note="Description of Artificial Sequence: Synthetic peptide"
  source: /note="Light Chain CDR3 of Inotuzumab"
LQGTHQPYT

SEQ ID NO: 9 - protein, 828 aa, Homo sapiens
  source: /note="Mature Human CD22"
DSSKWVFEHPETLYAWEGACVWIPCTYRALDGDLESFILFHNPEYNKNTSKFDGTRLYESTKDGKVPSEQKRVQFLGDKNKNCTLSIHPVHLNDSGQLGLRMESKTEKWMERIHLNVSERPFPPHIQLPPEIQESQEVTLTCLLNFSCYGYPIQLQWLLEGVPMRQAAVTSTSLTIKSVFTRSELKFSPQWSHHGKIVTCQLQDADGKFLSNDTVQLNVKHTPKLEIKVTPSDAIVREGDSVTMTCEVSSSNPEYTTVSWLKDGTSLKKQNTFTLNLREVTKDQSGKYCCQVSNDVGPGRSEEVFLQVQYAPEPSTVQILHSPAVEGSQVEFLCMSLANPLPTNYTWYHNGKEMQGRTEEKVHIPKILPWHAGTYSCVAENILGTGQRGPGAELDVQYPPKKVTTVIQNPMPIREGDTVTLSCNYNSSNPSVTRYEWKPHGAWEEPSLGVLKIQNVGWDNTTIACAACNSWCSWASPVALNVQYAPRDVRVRKIKPLSEIHSGNSVSLQCDFSSSHPKEVQFFWEKNGRLLGKESQLNFDSISPEDAGSYSCWVNNSIGQTASKAWTLEVLYAPRRLRVSMSPGDQVMEGKSATLTCESDANPPVSHYTWFDWNNQSLPYHSQKLRLEPVKVQHSGAYWCQGTNSVGKGRSPLSTLTVYYSPETIGRRVAVGLGSCLAILILAICGLKLQRRWKRTQSQQGLQENSSGQSFFVRNKKVRRAPLSEGPHSLGCYNPMMEDGISYTTLRFPEMNIPRTGDAESSEMQRPPPDCDDTVTYSALHKRQVGDYENVIPDFPEDEGIHYSELIQFGVGERPQAQENVDYVILKH

SEQ ID NO: 10 - DNA, 2484 bp, Homo sapiens
  source: /note="cDNA Encoding Mature Human CD22"
gactcaagtaaatgggtttttgagcaccctgaaaccctctacgcctgggagggggcctgcgtctggatcccctgcacctacagagccctagatggtgacctggaaagcttcatcctgttccacaatcctgagtataacaagaacacctcgaagtttgatgggacaagactctatgaaagcacaaaggatgggaaggttccttctgagcagaaaagggtgcaattcctgggagacaagaataagaactgcacactgagtatccacccggtgcacctcaatgacagtggtcagctggggctgaggatggagtccaagactgagaaatggatggaacgaatacacctcaatgtctctgaaaggccttttccacctcatatccagctccctccagaaattcaagagtcccaggaagtcactctgacctgcttgctgaatttctcctgctatgggtatccgatccaattgcagtggctcctagagggggttccaatgaggcaggctgctgtcacctcgacctccttgaccatcaagtctgtcttcacccggagcgagctcaagttctccccacagtggagtcaccatgggaagattgtgacctgccagcttcaggatgcagatgggaagttcctctccaatgacacggtgcagctgaacgtgaagcacaccccgaagttggagatcaaggtcactcccagtgatgccatagtgagggagggggactctgtgaccatgacctgcgaggtcagcagcagcaacccggagtacacgacggtatcctggctcaaggatgggacctcgctgaagaagcagaatacattcacgctaaacctgcgcgaagtgaccaaggaccagagtgggaagtactgctgtcaggtctccaatgacgtgggcccgggaaggtcggaagaagtgttcctgcaagtgcagtatgccccggaaccttccacggttcagatcctccactcaccggctgtggagggaagtcaagtcgagtttctttgcatgtcactggccaatcctcttccaacaaattacacgtggtaccacaatgggaaagaaatgcagggaaggacagaggagaaagtccacatcccaaagatcctcccctggcacgctgggacttattcctgtgtggcagaaaacattcttggtactggacagaggggcccgggagctgagctggatgtccagtatcctcccaagaaggtgaccacagtgattcaaaaccccatgccgattcgagaaggagacacagtgaccctttcctgtaactacaattccagtaaccccagtgttacccggtatgaatggaaaccccatggcgcctgggaggagccatcgcttggggtgctgaagatccaaaacgttggctgggacaacacaaccatcgcctgcgcagcttgtaatagttggtgctcgtgggcctcccctgtcgccctgaatgtccagtatgccccccgagacgtgagggtccggaaaatcaagcccctttccgagattcactctggaaactcggtcagcctccaatgtgacttctcaagcagccaccccaaagaagtccagttcttctgggagaaaaatggcaggcttctggggaaagaaagccagctgaattttgactccatctccccagaagatgctgggagttacagctgctgggtgaacaactccataggacagacagcgtccaaggcctggacacttgaagtgctgtatgcacccaggaggctgcgtgtgtccatgagcccgggggaccaagtgatggaggggaagagtgcaaccctgacctgtgagagcgacgccaaccctcccgtctcccactacacctggtttgactggaataaccaaagcctcccctaccacagccagaagctgagattggagccggtgaaggtccagcactcgggtgcctactggtgccaggggaccaacagtgtgggcaagggccgttcgcctctcagcaccctcaccgtctactatagcccggagaccatcggcaggcgagtggctgtgggactcgggtcctgcctcgccatcctcatcctggcaatctgtgggctcaagctccagcgacgttggaagaggacacagagccagcaggggcttcaggagaattccagcggccagagcttctttgtgaggaataaaaaggttagaagggcccccctctctgaaggcccccactccctgggatgctacaatccaatgatggaagatggcattagctacaccaccctgcgctttcccgagatgaacataccacgaactggagatgcagagtcctcagagatgcagagacctcccccggactgcgatgacacggtcacttattcagcattgcacaagcgccaagtgggcgactatgagaacgtcattccagattttccagaagatgaggggattcattactcagagctgatccagtttggggtcggggagcggcctcaggcacaagaaaatgtggactatgtgatcctcaaacat

SEQ ID NO: 11 - protein, 668 aa, Homo sapiens
  source: /note="Extracellular Domain of CD22"
DSSKWVFEHPETLYAWEGACVWIPCTYRALDGDLESFILFHNPEYNKNTSKFDGTRLYESTKDGKVPSEQKRVQFLGDKNKNCTLSIHPVHLNDSGQLGLRMESKTEKWMERIHLNVSERPFPPHIQLPPEIQESQEVTLTCLLNFSCYGYPIQLQWLLEGVPMRQAAVTSTSLTIKSVFTRSELKFSPQWSHHGKIVTCQLQDADGKFLSNDTVQLNVKHTPKLEIKVTPSDAIVREGDSVTMTCEVSSSNPEYTTVSWLKDGTSLKKQNTFTLNLREVTKDQSGKYCCQVSNDVGPGRSEEVFLQVQYAPEPSTVQILHSPAVEGSQVEFLCMSLANPLPTNYTWYHNGKEMQGRTEEKVHIPKILPWHAGTYSCVAENILGTGQRGPGAELDVQYPPKKVTTVIQNPMPIREGDTVTLSCNYNSSNPSVTRYEWKPHGAWEEPSLGVLKIQNVGWDNTTIACAACNSWCSWASPVALNVQYAPRDVRVRKIKPLSEIHSGNSVSLQCDFSSSHPKEVQFFWEKNGRLLGKESQLNFDSISPEDAGSYSCWVNNSIGQTASKAWTLEVLYAPRRLRVSMSPGDQVMEGKSATLTCESDANPPVSHYTWFDWNNQSLPYHSQKLRLEPVKVQHSGAYWCQGTNSVGKGRSPLSTLTVYYSPETIGRR

SEQ ID NO: 12 - DNA, 2004 bp, Homo sapiens
  source: /note="cDNA Encoding Extracellular Domain of CD22"
gactcaagtaaatgggtttttgagcaccctgaaaccctctacgcctgggagggggcctgcgtctggatcccctgcacctacagagccctagatggtgacctggaaagcttcatcctgttccacaatcctgagtataacaagaacacctcgaagtttgatgggacaagactctatgaaagcacaaaggatgggaaggttccttctgagcagaaaagggtgcaattcctgggagacaagaataagaactgcacactgagtatccacccggtgcacctcaatgacagtggtcagctggggctgaggatggagtccaagactgagaaatggatggaacgaatacacctcaatgtctctgaaaggccttttccacctcatatccagctccctccagaaattcaagagtcccaggaagtcactctgacctgcttgctgaatttctcctgctatgggtatccgatccaattgcagtggctcctagagggggttccaatgaggcaggctgctgtcacctcgacctccttgaccatcaagtctgtcttcacccggagcgagctcaagttctccccacagtggagtcaccatgggaagattgtgacctgccagcttcaggatgcagatgggaagttcctctccaatgacacggtgcagctgaacgtgaagcacaccccgaagttggagatcaaggtcactcccagtgatgccatagtgagggagggggactctgtgaccatgacctgcgaggtcagcagcagcaacccggagtacacgacggtatcctggctcaaggatgggacctcgctgaagaagcagaatacattcacgctaaacctgcgcgaagtgaccaaggaccagagtgggaagtactgctgtcaggtctccaatgacgtgggcccgggaaggtcggaagaagtgttcctgcaagtgcagtatgccccggaaccttccacggttcagatcctccactcaccggctgtggagggaagtcaagtcgagtttctttgcatgtcactggccaatcctcttccaacaaattacacgtggtaccacaatgggaaagaaatgcagggaaggacagaggagaaagtccacatcccaaagatcctcccctggcacgctgggacttattcctgtgtggcagaaaacattcttggtactggacagaggggcccgggagctgagctggatgtccagtatcctcccaagaaggtgaccacagtgattcaaaaccccatgccgattcgagaaggagacacagtgaccctttcctgtaactacaattccagtaaccccagtgttacccggtatgaatggaaaccccatggcgcctgggaggagccatcgcttggggtgctgaagatccaaaacgttggctgggacaacacaaccatcgcctgcgcagcttgtaatagttggtgctcgtgggcctcccctgtcgccctgaatgtccagtatgccccccgagacgtgagggtccggaaaatcaagcccctttccgagattcactctggaaactcggtcagcctccaatgtgacttctcaagcagccaccccaaagaagtccagttcttctgggagaaaaatggcaggcttctggggaaagaaagccagctgaattttgactccatctccccagaagatgctgggagttacagctgctgggtgaacaactccataggacagacagcgtccaaggcctggacacttgaagtgctgtatgcacccaggaggctgcgtgtgtccatgagcccgggggaccaagtgatggaggggaagagtgcaaccctgacctgtgagagcgacgccaaccctcccgtctcccactacacctggtttgactggaataaccaaagcctcccctaccacagccagaagctgagattggagccggtgaaggtccagcactcgggtgcctactggtgccaggggaccaacagtgtgggcaagggccgttcgcctctcagcaccctcaccgtctactatagcccggagaccatcggcaggcga

SEQ ID NO: 13 - protein, 121 aa, Artificial Sequence
  source: /note="Description of Artificial Sequence: Synthetic polypeptide"
  source: /note="Heavy Chain of Inotuzumab IgG histidine scanning variant #1"
EVQLVQSGAEVKKPGASVKVSCKASHYRFTNYWIHWVRQAPGQGLEWIGGINPGNNYATYRRKFQGRVTMTADTSTSTVYMELSSLRSEDTAVYYCTREGYGNYGAWFAYWGQGTLVTVSS

SEQ ID NO: 14 - protein, 121 aa, Artificial Sequence
  source: /note="Description of Artificial Sequence: Synthetic polypeptide"
  source: /note="Heavy Chain of Inotuzumab IgG histidine scanning variant #2"
EVQLVQSGAEVKKPGASVKVSCKASGHRFTNYWIHWVRQAPGQGLEWIGGINPGNNYATYRRKFQGRVTMTADTSTSTVYMELSSLRSEDTAVYYCTREGYGNYGAWFAYWGQGTLVTVSS

SEQ ID NO: 15 - protein, 121 aa, Artificial Sequence
  source: /note="Description of Artificial Sequence: Synthetic polypeptide"
  source: /note="Heavy Chain of Inotuzumab IgG histidine scanning variant #3"
EVQLVQSGAEVKKPGASVKVSCKASGYHFTNYWIHWVRQAPGQGLEWIGGINPGNNYATYRRKFQGRVTMTADTSTSTVYMELSSLRSEDTAVYYCTREGYGNYGAWFAYWGQGTLVTVSS

SEQ ID NO: 16 - protein, 121 aa, Artificial Sequence
  source: /note="Description of Artificial Sequence: Synthetic polypeptide"
  source: /note="Heavy Chain of Inotuzumab IgG histidine scanning variant #4"
EVQLVQSGAEVKKPGASVKVSCKASGYRHTNYWIHWVRQAPGQGLEWIGGINPGNNYATYRRKFQGRVTMTADTSTSTVYMELSSLRSEDTAVYYCTREGYGNYGAWFAYWGQGTLVTVSS

SEQ ID NO: 17 - protein, 121 aa, Artificial Sequence
  source: /note="Description of Artificial Sequence: Synthetic polypeptide"
  source: /note="Heavy Chain of Inotuzumab IgG histidine scanning variant #5"
EVQLVQSGAEVKKPGASVKVSCKASGYRFHNYWIHWVRQAPGQGLEWIGGINPGNNYATYRRKFQGRVTMTADTSTSTVYMELSSLRSEDTAVYYCTREGYGNYGAWFAYWGQGTLVTVSS

SEQ ID NO: 18 - protein, 121 aa, Artificial Sequence
  source: /note="Description of Artificial Sequence: Synthetic polypeptide"
  source: /note="Heavy Chain of Inotuzumab IgG histidine scanning variant #6"
EVQLVQSGAEVKKPGASVKVSCKASGYRFTHYWIHWVRQAPGQGLEWIGGINPGNNYATYRRKFQGRVTMTADTSTSTVYMELSSLRSEDTAVYYCTREGYGNYGAWFAYWGQGTLVTVSS

SEQ ID NO: 19 - protein, 121 aa, Artificial Sequence
  source: /note="Description of Artificial Sequence: Synthetic polypeptide"
  source: /note="Heavy Chain of Inotuzumab IgG histidine scanning variant #7"
EVQLVQSGAEVKKPGASVKVSCKASGYRFTNHWIHWVRQAPGQGLEWIGGINPGNNYATYRRKFQGRVTMTADTSTSTVYMELSSLRSEDTAVYYCTREGYGNYGAWFAYWGQGTLVTVSS

SEQ ID NO: 20 - protein, 121 aa, Artificial Sequence
  source: /note="Description of Artificial Sequence: Synthetic polypeptide"
  source: /note="Heavy Chain of Inotuzumab IgG histidine scanning variant #8"
EVQLVQSGAEVKKPGASVKVSCKASGYRFTNYHIHWVRQAPGQGLEWIGGINPGNNYATYRRKFQGRVTMTADTSTSTVYMELSSLRSEDTAVYYCTREGYGNYGAWFAYWGQGTLVTVSS

SEQ ID NO: 21 - protein, 121 aa, Artificial Sequence
  source: /note="Description of Artificial Sequence: Synthetic polypeptide"
  source: /note="Heavy Chain of Inotuzumab IgG histidine scanning variant #9"
EVQLVQSGAEVKKPGASVKVSCKASGYRFTNYWHHWVRQAPGQGLEWIGGINPGNNYATYRRKFQGRVTMTADTSTSTVYMELSSLRSEDTAVYYCTREGYGNYGAWFAYWGQGTLVTVSS

SEQ ID NO: 22 - protein, 121 aa, Artificial Sequence
  source: /note="Description of Artificial Sequence: Synthetic polypeptide"
  source: /note="Heavy Chain of Inotuzumab IgG histidine scanning variant #10"
EVQLVQSGAEVKKPGASVKVSCKASGYRFTNYWIAWVRQAPGQGLEWIGGINPGNNYATYRRKFQGRVTMTADTSTSTVYMELSSLRSEDTAVYYCTREGYGNYGAWFAYWGQGTLVTVSS

SEQ ID NO: 23 - protein, 121 aa, Artificial Sequence
  source: /note="Description of Artificial Sequence: Synthetic polypeptide"
  source: /note="Heavy Chain of Inotuzumab IgG histidine scanning variant #11"
EVQLVQSGAEVKKPGASVKVSCKASGYRFTNYWIHWVRQAPGQGLEWIGHINPGNNYATYRRKFQGRVTMTADTSTSTVYMELSSLRSEDTAVYYCTREGYGNYGAWFAYWGQGTLVTVSS

SEQ ID NO: 24 - protein, 121 aa, Artificial Sequence
  source: /note="Description of Artificial Sequence: Synthetic polypeptide"
  source: /note="Heavy Chain of Inotuzumab IgG histidine scanning variant #12"
EVQLVQSGAEVKKPGASVKVSCKASGYRFTNYWIHWVRQAPGQGLEWIGGHNPGNNYATYRRKFQGRVTMTADTSTSTVYMELSSLRSEDTAVYYCTREGYGNYGAWFAYWGQGTLVTVSS

SEQ ID NO: 25 - protein, 121 aa, Artificial Sequence
  source: /note="Description of Artificial Sequence: Synthetic polypeptide"
  source: /note="Heavy Chain of Inotuzumab IgG histidine scanning variant #13"
EVQLVQSGAEVKKPGASVKVSCKASGYRFTNYWIHWVRQAPGQGLEWIGGIHPGNNYATYRRKFQGRVTMTADTSTSTVYMELSSLRSEDTAVYYCTREGYGNYGAWFAYWGQGTLVTVSS

SEQ ID NO: 26 - protein, 121 aa, Artificial Sequence
  source: /note="Description of Artificial Sequence: Synthetic polypeptide"
  source: /note="Heavy Chain of Inotuzumab IgG histidine scanning variant #14"
EVQLVQSGAEVKKPGASVKVSCKASGYRFTNYWIHWVRQAPGQGLEWIGGINHGNNYATYRRKFQGRVTMTADTSTSTVYMELSSLRSEDTAVYYCTREGYGNYGAWFAYWGQGTLVTVSS

SEQ ID NO: 27 - protein, 121 aa, Artificial Sequence
  source: /note="Description of Artificial Sequence: Synthetic polypeptide"
  source: /note="Heavy Chain of Inotuzumab IgG histidine scanning variant #15"
EVQLVQSGAEVKKPGASVKVSCKASGYRFTNYWIHWVRQAPGQGLEWIGGINPHNNYATYRRKFQGRVTMTADTSTSTVYMELSSLRSEDTAVYYCTREGYGNYGAWFAYWGQGTLVTVSS

SEQ ID NO: 28 - protein, 121 aa, Artificial Sequence
  source: /note="Description of Artificial Sequence: Synthetic polypeptide"
  source: /note="Heavy Chain of Inotuzumab IgG histidine scanning variant #16"
EVQLVQSGAEVKKPGASVKVSCKASGYRFTNYWIHWVRQAPGQGLEWIGGINPGHNYATYRRKFQGRVTMTADTSTSTVYMELSSLRSEDTAVYYCTREGYGNYGAWFAYWGQGTLVTVSS

SEQ ID NO: 29 - protein, 121 aa, Artificial Sequence
  source: /note="Description of Artificial Sequence: Synthetic polypeptide"
  source: /note="Heavy Chain of Inotuzumab IgG histidine scanning variant #17"
EVQLVQSGAEVKKPGASVKVSCKASGYRFTNYWIHWVRQAPGQGLEWIGGINPGNHYATYRRKFQGRVTMTADTSTSTVYMELSSLRSEDTAVYYCTREGYGNYGAWFAYWGQGTLVTVSS

SEQ ID NO: 30 - protein, 121 aa, Artificial Sequence
  source: /note="Description of Artificial Sequence: Synthetic polypeptide"
  source: /note="Heavy Chain of Inotuzumab IgG histidine scanning variant #18"
EVQLVQSGAEVKKPGASVKVSCKASGYRFTNYWIHWVRQAPGQGLEWIGGINPGNNHATYRRKFQGRVTMTADTSTSTVYMELSSLRSEDTAVYYCTREGYGNYGAWFAYWGQGTLVTVSS

SEQ ID NO: 31 - protein, 121 aa, Artificial Sequence
  source: /note="Description of Artificial Sequence: Synthetic polypeptide"
  source: /note="Heavy Chain of Inotuzumab IgG histidine scanning variant #19"
EVQLVQSGAEVKKPGASVKVSCKASGYRFTNYWIHWVRQAPGQGLEWIGGINPGNNYHTYRRKFQGRVTMTADTSTSTVYMELSSLRSEDTAVYYCTREGYGNYGAWFAYWGQGTLVTVSS

SEQ ID NO: 32 - protein, 121 aa, Artificial Sequence
  source: /note="Description of Artificial Sequence: Synthetic polypeptide"
  source: /note="Heavy Chain of Inotuzumab IgG histidine scanning variant #20"
EVQLVQSGAEVKKPGASVKVSCKASGYRFTNYWIHWVRQAPGQGLEWIGGINPGNNYAHYRRKFQGRVTMTADTSTSTVYMELSSLRSEDTAVYYCTREGYGNYGAWFAYWGQGTLVTVSS

SEQ ID NO: 33 - protein, 121 aa, Artificial Sequence
  source: /note="Description of Artificial Sequence: Synthetic polypeptide"
  source: /note="Heavy Chain of Inotuzumab IgG histidine scanning variant #21"
EVQLVQSGAEVKKPGASVKVSCKASGYRFTNYWIHWVRQAPGQGLEWIGGINPGNNYATHRRKFQGRVTMTADTSTSTVYMELSSLRSEDTAVYYCTREGYGNYGAWFAYWGQGTLVTVSS

SEQ ID NO: 34 - protein, 121 aa, Artificial Sequence
  source: /note="Description of Artificial Sequence: Synthetic polypeptide"
  source: /note="Heavy Chain of Inotuzumab IgG histidine scanning variant #22"
EVQLVQSGAEVKKPGASVKVSCKASGYRFTNYWIHWVRQAPGQGLEWIGGINPGNNYATYHRKFQGRVTMTADTSTSTVYMELSSLRSEDTAVYYCTREGYGNYGAWFAYWGQGTLVTVSS

SEQ ID NO: 35 - protein, 121 aa, Artificial Sequence
  source: /note="Description of Artificial Sequence: Synthetic polypeptide"
  source: /note="Heavy Chain of Inotuzumab IgG histidine scanning variant #23"
EVQLVQSGAEVKKPGASVKVSCKASGYRFTNYWIHWVRQAPGQGLEWIGGINPGNNYATYRHKFQGRVTMTADTSTSTVYMELSSLRSEDTAVYYCTREGYGNYGAWFAYWGQGTLVTVSS

SEQ ID NO: 36 - protein, 121 aa, Artificial Sequence
  source: /note="Description of Artificial Sequence: Synthetic polypeptide"
  source: /note="Heavy Chain of Inotuzumab IgG histidine scanning variant #24"
EVQLVQSGAEVKKPGASVKVSCKASGYRFTNYWIHWVRQAPGQGLEWIGGINPGNNYATYRRHFQGRVTMTADTSTSTVYMELSSLRSEDTAVYYCTREGYGNYGAWFAYWGQGTLVTVSS

SEQ ID NO: 37 - protein, 121 aa, Artificial Sequence
  source: /note="Description of Artificial Sequence: Synthetic polypeptide"
  source: /note="Heavy Chain of Inotuzumab IgG histidine scanning variant #25"
EVQLVQSGAEVKKPGASVKVSCKASGYRFTNYWIHWVRQAPGQGLEWIGGINPGNNYATYRRKHQGRVTMTADTSTSTVYMELSSLRSEDTAVYYCTREGYGNYGAWFAYWGQGTLVTVSS

SEQ ID NO: 38 - protein, 121 aa, Artificial Sequence
  source: /note="Description of Artificial Sequence: Synthetic polypeptide"
  source: /note="Heavy Chain of Inotuzumab IgG histidine scanning variant #26"
EVQLVQSGAEVKKPGASVKVSCKASGYRFTNYWIHWVRQAPGQGLEWIGGINPGNNYATYRRKFQGRVTMTADTSTSTVYMELSSLRSEDTAVYYCHREGYGNYGAWFAYWGQGTLVTVSS

SEQ ID NO: 39 - protein, 121 aa, Artificial Sequence
  source: /note="Description of Artificial Sequence: Synthetic polypeptide"
  source: /note="Heavy Chain of Inotuzumab IgG histidine scanning variant #27"
EVQLVQSGAEVKKPGASVKVSCKASGYRFTNYWIHWVRQAPGQGLEWIGGINPGNNYATYRRKFQGRVTMTADTSTSTVYMELSSLRSEDTAVYYCTHEGYGNYGAWFAYWGQGTLVTVSS

SEQ ID NO: 40 - protein, 121 aa, Artificial Sequence
  source: /note="Description of Artificial Sequence: Synthetic polypeptide"
  source: /note="Heavy Chain of Inotuzumab IgG histidine scanning variant #28"
EVQLVQSGAEVKKPGASVKVSCKASGYRFTNYWIHWVRQAPGQGLEWIGGINPGNNYATYRRKFQGRVTMTADTSTSTVYMELSSLRSEDTAVYYCTRHGYGNYGAWFAYWGQGTLVTVSS

SEQ ID NO: 41 - protein, 121 aa, Artificial Sequence
  source: /note="Description of Artificial Sequence: Synthetic polypeptide"
  source: /note="Heavy Chain of Inotuzumab IgG histidine scanning variant #29"
EVQLVQSGAEVKKPGASVKVSCKASGYRFTNYWIHWVRQAPGQGLEWIGGINPGNNYATYRRKFQGRVTMTADTSTSTVYMELSSLRSEDTAVYYCTREHYGNYGAWFAYWGQGTLVTVSS

SEQ ID NO: 42 - protein, 121 aa, Artificial Sequence
  source: /note="Description of Artificial Sequence: Synthetic polypeptide"
  source: /note="Heavy Chain of Inotuzumab IgG histidine scanning variant #30"
EVQLVQSGAEVKKPGASVKVSCKASGYRFTNYWIHWVRQAPGQGLEWIGGINPGNNYATYRRKFQGRVTMTADTSTSTVYMELSSLRSEDTAVYYCTREGHGNYGAWFAYWGQGTLVTVSS

SEQ ID NO: 43 - protein, 121 aa, Artificial Sequence
  source: /note="Description of Artificial Sequence: Synthetic polypeptide"
  source: /note="Heavy Chain of Inotuzumab IgG histidine scanning variant #31"
EVQLVQSGAEVKKPGASVKVSCKASGYRFTNYWIHWVRQAPGQGLEWIGGINPGNNYATYRRKFQGRVTMTADTSTSTVYMELSSLRSEDTAVYYCTREGYHNYGAWFAYWGQGTLVTVSS

SEQ ID NO: 44 - protein, 121 aa, Artificial Sequence
  source: /note="Description of Artificial Sequence: Synthetic polypeptide"
  source: /note="Heavy Chain of Inotuzumab IgG histidine scanning variant #32"
EVQLVQSGAEVKKPGASVKVSCKASGYRFTNYWIHWVRQAPGQGLEWIGGINPGNNYATYRRKFQGRVTMTADTSTSTVYMELSSLRSEDTAVYYCTREGYGHYGAWFAYWGQGTLVTVSS

SEQ ID NO: 45 - protein, 121 aa, Artificial Sequence
  source: /note="Description of Artificial Sequence: Synthetic polypeptide"
  source: /note="Heavy Chain of Inotuzumab IgG histidine scanning variant #33"
EVQLVQSGAEVKKPGASVKVSCKASGYRFTNYWIHWVRQAPGQGLEWIGGINPGNNYATYRRKFQGRVTMTADTSTSTVYMELSSLRSEDTAVYYCTREGYGNHGAWFAYWGQGTLVTVSS

SEQ ID NO: 46 - protein, 121 aa, Artificial Sequence
  source: /note="Description of Artificial Sequence: Synthetic polypeptide"
  source: /note="Heavy Chain of Inotuzumab IgG histidine scanning variant #34"
EVQLVQSGAEVKKPGASVKVSCKASGYRFTNYWIHWVRQAPGQGLEWIGGINPGNNYATYRRKFQGRVTMTADTSTSTVYMELSSLRSEDTAVYYCTREGYGNYHAWFAYWGQGTLVTVSS

SEQ ID NO: 47 - protein, 121 aa, Artificial Sequence
  source: /note="Description of Artificial Sequence: Synthetic polypeptide"
  source: /note="Heavy Chain of Inotuzumab IgG histidine scanning variant #35"
EVQLVQSGAEVKKPGASVKVSCKASGYRFTNYWIHWVRQAPGQGLEWIGGINPGNNYATYRRKFQGRVTMTADTSTSTVYMELSSLRSEDTAVYYCTREGYGNYGHWFAYWGQGTLVTVSS

SEQ ID NO: 48 - protein, 121 aa, Artificial Sequence
  source: /note="Description of Artificial Sequence: Synthetic polypeptide"
  source: /note="Heavy Chain of Inotuzumab IgG histidine scanning variant #36"
EVQLVQSGAEVKKPGASVKVSCKASGYRFTNYWIHWVRQAPGQGLEWIGGINPGNNYATYRRKFQGRVTMTADTSTSTVYMELSSLRSEDTAVYYCTREGYGNYGAHFAYWGQGTLVTVSS

SEQ ID NO: 49 - protein, 121 aa, Artificial Sequence
  source: /note="Description of Artificial Sequence: Synthetic polypeptide"
  source: /note="Heavy Chain of Inotuzumab IgG histidine scanning variant #37"
EVQLVQSGAEVKKPGASVKVSCKASGYRFTNYWIHWVRQAPGQGLEWIGGINPGNNYATYRRKFQGRVTMTADTSTSTVYMELSSLRSEDTAVYYCTREGYGNYGAWHAYWGQGTLVTVSS

SEQ ID NO: 50 - protein, 121 aa, Artificial Sequence
  source: /note="Description of Artificial Sequence: Synthetic polypeptide"
  source: /note="Heavy Chain of Inotuzumab IgG histidine scanning variant #38"
EVQLVQSGAEVKKPGASVKVSCKASGYRFTNYWIHWVRQAPGQGLEWIGGINPGNNYATYRRKFQGRVTMTADTSTSTVYMELSSLRSEDTAVYYCTREGYGNYGAWFHYWGQGTLVTVSS

SEQ ID NO: 51 - protein, 121 aa, Artificial Sequence
  source: /note="Description of Artificial Sequence: Synthetic polypeptide"
  source: /note="Heavy Chain of Inotuzumab IgG histidine scanning variant #39"
EVQLVQSGAEVKKPGASVKVSCKASGYRFTNYWIHWVRQAPGQGLEWIGGINPGNNYATYRRKFQGRVTMTADTSTSTVYMELSSLRSEDTAVYYCTREGYGNYGAWFAHWGQGTLVTVSS

SEQ ID NO: 52 - protein, 112 aa, Artificial Sequence
  source: /note="Description of Artificial Sequence: Synthetic polypeptide"
  source: /note="Light Chain of Inotuzumab IgG histidine scanning variant #1"
DVQVTQSPSSLSASVGDRVTITCHSSQSLANSYGNTFLSWYLHKPGKAPQLLIYGISNRFSGVPDRFSGSGSGTDFTLTISSLQPEDFATYYCLQGTHQPYTFGQGTKVEIK

SEQ ID NO: 53 - protein, 112 aa, Artificial Sequence
  source: /note="Description of Artificial Sequence: Synthetic polypeptide"
  source: /note="Light Chain of Inotuzumab IgG histidine scanning variant #2"
DVQVTQSPSSLSASVGDRVTITCRHSQSLANSYGNTFLSWYLHKPGKAPQLLIYGISNRFSGVPDRFSGSGSGTDFTLTISSLQPEDFATYYCLQGTHQPYTFGQGTKVEIK

SEQ ID NO: 54 - protein, 112 aa, Artificial Sequence
  source: /note="Description of Artificial Sequence: Synthetic polypeptide"
  source: /note="Light Chain of Inotuzumab IgG histidine scanning variant #3"
DVQVTQSPSSLSASVGDRVTITCRSHQSLANSYGNTFLSWYLHKPGKAPQLLIYGISNRFSGVPDRFSGSGSGTDFTLTISSLQPEDFATYYCLQGTHQPYTFGQGTKVEIK

SEQ ID NO: 55 - protein, 112 aa, Artificial Sequence
  source: /note="Description of Artificial Sequence: Synthetic polypeptide"
  source: /note="Light Chain of Inotuzumab IgG histidine scanning variant #4"
DVQVTQSPSSLSASVGDRVTITCRSSHSLANSYGNTFLSWYLHKPGKAPQLLIYGISNRFSGVPDRFSGSGSGTDFTLTISSLQPEDFATYYCLQGTHQPYTFGQGTKVEIK

SEQ ID NO: 56 - protein, 112 aa, Artificial Sequence
  source: /note="Description of Artificial Sequence: Synthetic polypeptide"
  source: /note="Light Chain of Inotuzumab IgG histidine scanning variant #5"
DVQVTQSPSSLSASVGDRVTITCRSSQHLANSYGNTFLSWYLHKPGKAPQLLIYGISNRFSGVPDRFSGSGSGTDFTLTISSLQPEDFATYYCLQGTHQPYTFGQGTKVEIK

SEQ ID NO: 57 - protein, 112 aa, Artificial Sequence
  source: /note="Description of Artificial Sequence: Synthetic polypeptide"
  source: /note="Light Chain of Inotuzumab IgG histidine scanning variant #6"
DVQVTQSPSSLSASVGDRVTITCRSSQSHANSYGNTFLSWYLHKPGKAPQLLIYGISNRFSGVPDRFSGSGSGTDFTLTISSLQPEDFATYYCLQGTHQPYTFGQGTKVEIK

SEQ ID NO: 58 - protein, 112 aa, Artificial Sequence
  source: /note="Description of Artificial Sequence: Synthetic polypeptide"
  source: /note="Light Chain of Inotuzumab IgG histidine scanning variant #7"
DVQVTQSPSSLSASVGDRVTITCRSSQSLHNSYGNTFLSWYLHKPGKAPQLLIYGISNRFSGVPDRFSGSGSGTDFTLTISSLQPEDFATYYCLQGTHQPYTFGQGTKVEIK

SEQ ID NO: 59 - protein, 112 aa, Artificial Sequence
  source: /note="Description of Artificial Sequence: Synthetic polypeptide"
  source: /note="Light Chain of Inotuzumab IgG histidine scanning variant #8"
DVQVTQSPSSLSASVGDRVTITCRSSQSLAHSYGNTFLSWYLHKPGKAPQLLIYGISNRFSGVPDRFSGSGSGTDFTLTISSLQPEDFATYYCLQGTHQPYTFGQGTKVEIK

SEQ ID NO: 60 - protein, 112 aa, Artificial Sequence
  source: /note="Description of Artificial Sequence: Synthetic polypeptide"
  source: /note="Light Chain of Inotuzumab IgG histidine scanning variant #9"
DVQVTQSPSSLSASVGDRVTITCRSSQSLANHYGNTFLSWYLHKPGKAPQLLIYGISNRFSGVPDRFSGSGSGTDFTLTISSLQPEDFATYYCLQGTHQPYTFGQGTKVEIK

SEQ ID NO: 61 - protein, 112 aa, Artificial Sequence
  source: /note="Description of Artificial Sequence: Synthetic polypeptide"
  source: /note="Light Chain of Inotuzumab IgG histidine scanning variant #10"
DVQVTQSPSSLSASVGDRVTITCRSSQSLANSHGNTFLSWYLHKPGKAPQLLIYGISNRFSGVPDRFSGSGSGTDFTLTISSLQPEDFATYYCLQGTHQPYTFGQGTKVEIK

SEQ ID NO: 62 - protein, 112 aa, Artificial Sequence
  source: /note="Description of Artificial Sequence: Synthetic polypeptide"
  source: /note="Light Chain of Inotuzumab IgG histidine scanning variant #11"
DVQVTQSPSSLSASVGDRVTITCRSSQSLANSYHNTFLSWYLHKPGKAPQLLIYGISNRFSGVPDRFSGSGSGTDFTLTISSLQPEDFATYYCLQGTHQPYTFGQGTKVEIK

SEQ ID NO: 63 - protein, 112 aa, Artificial Sequence
  source: /note="Description of Artificial Sequence: Synthetic polypeptide"
  source: /note="Light Chain of Inotuzumab IgG histidine scanning variant #12"
DVQVTQSPSSLSASVGDRVTITCRSSQSLANSYGHTFLSWYLHKPGKAPQLLIYGISNRFSGVPDRFSGSGSGTDFTLTISSLQPEDFATYYCLQGTHQPYTFGQGTKVEIK

SEQ ID NO: 64 - protein, 112 aa, Artificial Sequence
  source: /note="Description of Artificial Sequence: Synthetic polypeptide"
  source: /note="Light Chain of Inotuzumab IgG histidine scanning variant #13"
DVQVTQSPSSLSASVGDRVTITCRSSQSLANSYGNHFLSWYLHKPGKAPQLLIYGISNRFSGVPDRFSGSGSGTDFTLTISSLQPEDFATYYCLQGTHQPYTFGQGTKVEIK

SEQ ID NO: 65 - protein, 112 aa, Artificial Sequence
  source: /note="Description of Artificial Sequence: Synthetic polypeptide"
  source: /note="Light Chain of Inotuzumab IgG histidine scanning variant #14"
DVQVTQSPSSLSASVGDRVTITCRSSQSLANSYGNTHLSWYLHKPGKAPQLLIYGISNRFSGVPDRFSGSGSGTDFTLTISSLQPEDFATYYCLQGTHQPYTFGQGTKVEIK

SEQ ID NO: 66 - protein, 112 aa, Artificial Sequence
  source: /note="Description of Artificial Sequence: Synthetic polypeptide"
  source: /note="Light Chain of Inotuzumab IgG histidine scanning variant #15"
DVQVTQSPSSLSASVGDRVTITCRSSQSLANSYGNTFHSWYLHKPGKAPQLLIYGISNRFSGVPDRFSGSGSGTDFTLTISSLQPEDFATYYCLQGTHQPYTFGQGTKVEIK

SEQ ID NO: 67 - protein, 112 aa, Artificial Sequence
  source: /note="Description of Artificial Sequence: Synthetic polypeptide"
  source: /note="Light Chain of Inotuzumab IgG histidine scanning variant #16"
DVQVTQSPSSLSASVGDRVTITCRSSQSLANSYGNTFLHWYLHKPGKAPQLLIYGISNRFSGVPDRFSGSGSGTDFTLTISSLQPEDFATYYCLQGTHQPYTFGQGTKVEIK

SEQ ID NO: 68 - protein, 112 aa, Artificial Sequence
  source: /note="Description of Artificial Sequence: Synthetic polypeptide"
  source: /note="Light Chain of Inotuzumab IgG histidine scanning variant #17"
DVQVTQSPSSLSASVGDRVTITCRSSQSLANSYGNTFLSWYLHKPGKAPQLLIYHISNRFSGVPDRFSGSGSGTDFTLTISSLQPEDFATYYCLQGTHQPYTFGQGTKVEIK

SEQ ID NO: 69 - protein, 112 aa, Artificial Sequence
  source: /note="Description of Artificial Sequence: Synthetic polypeptide"
  source: /note="Light Chain of Inotuzumab IgG histidine scanning variant #18"
DVQVTQSPSSLSASVGDRVTITCRSSQSLANSYGNTFLSWYLHKPGKAPQLLIYGHSNRFSGVPDRFSGSGSGTDFTLTISSLQPEDFATYYCLQGTHQPYTFGQGTKVEIK

SEQ ID NO: 70 - protein, 112 aa, Artificial Sequence
  source: /note="Description of Artificial Sequence: Synthetic polypeptide"
  source: /note="Light Chain of Inotuzumab IgG histidine scanning variant #19"
DVQVTQSPSSLSASVGDRVTITCRSSQSLANSYGNTFLSWYLHKPGKAPQLLIYGIHNRFSGVPDRFSGSGSGTDFTLTISSLQPEDFATYYCLQGTHQPYTFGQGTKVEIK

SEQ ID NO: 71 - protein, 112 aa, Artificial Sequence
  source: /note="Description of Artificial Sequence: Synthetic polypeptide"
  source: /note="Light Chain of Inotuzumab IgG histidine scanning variant #20"
DVQVTQSPSSLSASVGDRVTITCRSSQSLANSYGNTFLSWYLHKPGKAPQLLIYGISHRFSGVPDRFSGSGSGTDFTLTISSLQPEDFATYYCLQGTHQPYTFGQGTKVEIK

SEQ ID NO: 72 - protein, 112 aa, Artificial Sequence
  source: /note="Description of Artificial Sequence: Synthetic polypeptide"
  source: /note="Light Chain of Inotuzumab IgG histidine scanning variant #21"
DVQVTQSPSSLSASVGDRVTITCRSSQSLANSYGNTFLSWYLHKPGKAPQLLIYGISNHFSGVPDRFSGSGSGTDFTLTISSLQPEDFATYYCLQGTHQPYTFGQGTKVEIK

SEQ ID NO: 73 - protein, 112 aa, Artificial Sequence
  source: /note="Description of Artificial Sequence: Synthetic polypeptide"
  source: /note="Light Chain of Inotuzumab IgG histidine scanning variant #22"
DVQVTQSPSSLSASVGDRVTITCRSSQSLANSYGNTFLSWYLHKPGKAPQLLIYGISNRHSGVPDRFSGSGSGTDFTLTISSLQPEDFATYYCLQGTHQPYTFGQGTKVEIK

SEQ ID NO: 74 - protein, 112 aa, Artificial Sequence
  source: /note="Description of Artificial Sequence: Synthetic polypeptide"
  source: /note="Light Chain of Inotuzumab IgG histidine scanning variant #23"
DVQVTQSPSSLSASVGDRVTITCRSSQSLANSYGNTFLSWYLHKPGKAPQLLIYGISNRFHGVPDRFSGSGSGTDFTLTISSLQPEDFATYYCLQGTHQPYTFGQGTKVEIK

SEQ ID NO: 75 - protein, 112 aa, Artificial Sequence
  source: /note="Description of Artificial Sequence: Synthetic polypeptide"
  source: /note="Light Chain of Inotuzumab IgG histidine scanning variant #24"
DVQVTQSPSSLSASVGDRVTITCRSSQSLANSYGNTFLSWYLHKPGKAPQLLIYGISNRFSGVPDRFSGSGSGTDFTLTISSLQPEDFATYYCHQGTHQPYTFGQGTKVEIK

SEQ ID NO: 76 - protein, 112 aa, Artificial Sequence
  source: /note="Description of Artificial Sequence: Synthetic polypeptide"
  source: /note="Light Chain of Inotuzumab IgG histidine scanning variant #25"
DVQVTQSPSSLSASVGDRVTITCRSSQSLANSYGNTFLSWYLHKPGKAPQLLIYGISNRFSGVPDRFSGSGSGTDFTLTISSLQPEDFATYYCLHGTHQPYTFGQGTKVEIK

SEQ ID NO: 77 - protein, 112 aa, Artificial Sequence
  source: /note="Description of Artificial Sequence: Synthetic polypeptide"
  source: /note="Light Chain of Inotuzumab IgG histidine scanning variant #26"
DVQVTQSPSSLSASVGDRVTITCRSSQSLANSYGNTFLSWYLHKPGKAPQLLIYGISNRFSGVPDRFSGSGSGTDFTLTISSLQPEDFATYYCLQHTHQPYTFGQGTKVEIK

SEQ ID NO: 78 - protein, 112 aa, Artificial Sequence
  source: /note="Description of Artificial Sequence: Synthetic polypeptide"
  source: /note="Light Chain of Inotuzumab IgG histidine scanning variant #27"
DVQVTQSPSSLSASVGDRVTITCRSSQSLANSYGNTFLSWYLHKPGKAPQLLIYGISNRFSGVPDRFSGSGSGTDFTLTISSLQPEDFATYYCLQGHHQPYTFGQGTKVEIK

SEQ ID NO: 79 - protein, 112 aa, Artificial Sequence
  source: /note="Description of Artificial Sequence: Synthetic polypeptide"
  source: /note="Light Chain of Inotuzumab IgG histidine scanning variant #28"
DVQVTQSPSSLSASVGDRVTITCRSSQSLANSYGNTFLSWYLHKPGKAPQLLIYGISNRFSGVPDRFSGSGSGTDFTLTISSLQPEDFATYYCLQGTAQPYTFGQGTKVEIK

SEQ ID NO: 80 - protein, 112 aa, Artificial Sequence
  source: /note="Description of Artificial Sequence: Synthetic polypeptide"
  source: /note="Light Chain of Inotuzumab IgG histidine scanning variant #29"
DVQVTQSPSSLSASVGDRVTITCRSSQSLANSYGNTFLSWYLHKPGKAPQLLIYGISNRFSGVPDRFSGSGSGTDFTLTISSLQPEDFATYYCLQGTHHPYTFGQGTKVEIK

SEQ ID NO: 81 - protein, 112 aa, Artificial Sequence
  source: /note="Description of Artificial Sequence: Synthetic polypeptide"
  source: /note="Light Chain of Inotuzumab IgG histidine scanning variant #30"
DVQVTQSPSSLSASVGDRVTITCRSSQSLANSYGNTFLSWYLHKPGKAPQLLIYGISNRFSGVPDRFSGSGSGTDFTLTISSLQPEDFATYYCLQGTHQHYTFGQGTKVEIK

SEQ ID NO: 82 - protein, 112 aa, Artificial Sequence
  source: /note="Description of Artificial Sequence: Synthetic polypeptide"
  source: /note="Light Chain of Inotuzumab IgG histidine scanning variant #31"
DVQVTQSPSSLSASVGDRVTITCRSSQSLANSYGNTFLSWYLHKPGKAPQLLIYGISNRFSGVPDRFSGSGSGTDFTLTISSLQPEDFATYYCLQGTHQPHTFGQGTKVEIK

SEQ ID NO: 83 - protein, 112 aa, Artificial Sequence
  source: /note="Description of Artificial Sequence: Synthetic polypeptide"
  source: /note="Light Chain of Inotuzumab IgG histidine scanning variant #32"
DVQVTQSPSSLSASVGDRVTITCRSSQSLANSYGNTFLSWYLHKPGKAPQLLIYGISNRFSGVPDRFSGSGSGTDFTLTISSLQPEDFATYYCLQGTHQPYHFGQGTKVEIK

SEQ ID NO: 84 - protein, 121 aa, Artificial Sequence
  source: /note="Description of Artificial Sequence: Synthetic polypeptide"
  source: /note="Heavy Chain Combinations of Inotuzumab IgG histidine scanning variant #1"
EVQLVQSGAEVKKPGASVKVSCKASGYRFTHYWIHWVRQAPGQGLEWIGGHNPGNNYATYRRKFQGRVTMTADTSTSTVYMELSSLRSEDTAVYYCTREGYGNYGAWFAYWGQGTLVTVSS

SEQ ID NO: 85 - protein, 121 aa, Artificial Sequence
  source: /note="Description of Artificial Sequence: Synthetic polypeptide"
  source: /note="Heavy Chain Combinations of Inotuzumab IgG histidine scanning variant #2"
EVQLVQSGAEVKKPGASVKVSCKASGYRFTHYWIHWVRQAPGQGLEWIGGINPGNHYATYRRKFQGRVTMTADTSTSTVYMELSSLRSEDTAVYYCTREGYGNYGAWFAYWGQGTLVTVSS

SEQ ID NO: 86 - protein, 121 aa, Artificial Sequence
  source: /note="Description of Artificial Sequence: Synthetic polypeptide"
  source: /note="Heavy Chain Combinations of Inotuzumab IgG histidine scanning variant #3"
EVQLVQSGAEVKKPGASVKVSCKASGYRFTHYWIHWVRQAPGQGLEWIGGINPGNNYAHYRRKFQGRVTMTADTSTSTVYMELSSLRSEDTAVYYCTREGYGNYGAWFAYWGQGTLVTVSS

SEQ ID NO: 87 - protein, 121 aa, Artificial Sequence
  source: /note="Description of Artificial Sequence: Synthetic polypeptide"
  source: /note="Heavy Chain Combinations of Inotuzumab IgG histidine scanning variant #4"
EVQLVQSGAEVKKPGASVKVSCKASGYRFTHYWIHWVRQAPGQGLEWIGGINPGNNYATHRRKFQGRVTMTADTSTSTVYMELSSLRSEDTAVYYCTREGYGNYGAWFAYWGQGTLVTVSS

SEQ ID NO: 88 - protein, 121 aa, Artificial Sequence
  source: /note="Description of Artificial Sequence: Synthetic polypeptide"
  source: /note="Heavy Chain Combinations of Inotuzumab IgG histidine scanning variant #5"
EVQLVQSGAEVKKPGASVKVSCKASGYRFTNYWIHWVRQAPGQGLEWIGGHNPGNHYATYRRKFQGRVTMTADTSTSTVYMELSSLRSEDTAVYYCTREGYGNYGAWFAYWGQGTLVTVSS

SEQ ID NO: 89 - protein, 121 aa, Artificial Sequence
  source: /note="Description of Artificial Sequence: Synthetic polypeptide"
  source: /note="Heavy Chain Combinations of Inotuzumab IgG histidine scanning variant #6"
EVQLVQSGAEVKKPGASVKVSCKASGYRFTNYWIHWVRQAPGQGLEWIGGHNPGNNYAHYRRKFQGRVTMTADTSTSTVYMELSSLRSEDTAVYYCTREGYGNYGAWFAYWGQGTLVTVSS

SEQ ID NO: 90 - protein, 121 aa, Artificial Sequence
  source: /note="Description of Artificial Sequence: Synthetic polypeptide"
  source: /note="Heavy Chain Combinations of Inotuzumab IgG histidine scanning variant #7"
EVQLVQSGAEVKKPGASVKVSCKASGYRFTNYWIHWVRQAPGQGLEWIGGHNPGNNYATHRRKFQGRVTMTADTSTSTVYMELSSLRSEDTAVYYCTREGYGNYGAWFAYWGQGTLVTVSS

SEQ ID NO: 91 - protein, 121 aa, Artificial Sequence
  source: /note="Description of Artificial Sequence: Synthetic polypeptide"
  source: /note="Heavy Chain Combinations of Inotuzumab IgG histidine scanning variant #8"
EVQLVQSGAEVKKPGASVKVSCKASGYRFTNYWIHWVRQAPGQGLEWIGGINPGNHYAHYRRKFQGRVTMTADTSTSTVYMELSSLRSEDTAVYYCTREGYGNYGAWFAYWGQGTLVTVSS

SEQ ID NO: 92 - protein, 121 aa, Artificial Sequence
  source: /note="Description of Artificial Sequence: Synthetic polypeptide"
  source: /note="Heavy Chain Combinations of Inotuzumab IgG histidine scanning variant #9"
EVQLVQSGAEVKKPGASVKVSCKASGYRFTNYWIHWVRQAPGQGLEWIGGINPGNHYATHRRKFQGRVTMTADTSTSTVYMELSSLRSEDTAVYYCTREGYGNYGAWFAYWGQGTLVTVSS

SEQ ID NO: 93 - protein, 121 aa, Artificial Sequence
  source: /note="Description of Artificial Sequence: Synthetic polypeptide"
  source: /note="Heavy Chain Combinations of Inotuzumab IgG histidine scanning variant #10"
EVQLVQSGAEVKKPGASVKVSCKASGYRFTNYWIHWVRQAPGQGLEWIGGINPGNNYAHHRRKFQGRVTMTADTSTSTVYMELSSLRSEDTAVYYCTREGYGNYGAWFAYWGQGTLVTVSS

SEQ ID NO: 94 - protein, 121 aa, Artificial Sequence
  source: /note="Description of Artificial Sequence: Synthetic polypeptide"
  source: /note="Heavy Chain Combinations of Inotuzumab IgG histidine scanning variant #11"
EVQLVQSGAEVKKPGASVKVSCKASGYRFTHYWIHWVRQAPGQGLEWIGGHNPGNHYATYRRKFQGRVTMTADTSTSTVYMELSSLRSEDTAVYYCTREGYGNYGAWFAYWGQGTLVTVSS

SEQ ID NO: 95 - protein, 121 aa, Artificial Sequence
  source: /note="Description of Artificial Sequence: Synthetic polypeptide"
  source: /note="Heavy Chain Combinations of Inotuzumab IgG histidine scanning variant #12"
EVQLVQSGAEVKKPGASVKVSCKASGYRFTHYWIHWVRQAPGQGLEWIGGHNPGNNYAHYRRKFQGRVTMTADTSTSTVYMELSSLRSEDTAVYYCTREGYGNYGAWFAYWGQGTLVTVSS

SEQ ID NO: 96 - protein, 121 aa, Artificial Sequence
  source: /note="Description of Artificial Sequence: Synthetic polypeptide"
  source: /note="Heavy Chain Combinations of Inotuzumab IgG histidine scanning variant #13"
EVQLVQSGAEVKKPGASVKVSCKASGYRFTHYWIHWVRQAPGQGLEWIGGHNPGNNYATHRRKFQGRVTMTADTSTSTVYMELSSLRSEDTAVYYCTREGYGNYGAWFAYWGQGTLVTVSS

SEQ ID NO: 97 - protein, 121 aa, Artificial Sequence
  source: /note="Description of Artificial Sequence: Synthetic polypeptide"
  source: /note="Heavy Chain Combinations of Inotuzumab IgG histidine scanning variant #14"
EVQLVQSGAEVKKPGASVKVSCKASGYRFTHYWIHWVRQAPGQGLEWIGGINPGNHYAHYRRKFQGRVTMTADTSTSTVYMELSSLRSEDTAVYYCTREGYGNYGAWFAYWGQGTLVTVSS

SEQ ID NO: 98 - protein, 121 aa, Artificial Sequence
  source: /note="Description of Artificial Sequence: Synthetic polypeptide"
  source: /note="Heavy Chain Combinations of Inotuzumab IgG histidine scanning variant #15"
EVQLVQSGAEVKKPGASVKVSCKASGYRFTHYWIHWVRQAPGQGLEWIGGINPGNHYATHRRKFQGRVTMTADTSTSTVYMELSSLRSEDTAVYYCTREGYGNYGAWFAYWGQGTLVTVSS

SEQ ID NO: 99 - protein, 121 aa, Artificial Sequence
  source: /note="Description of Artificial Sequence: Synthetic polypeptide"
  source: /note="Heavy Chain Combinations of Inotuzumab IgG histidine scanning variant #16"
EVQLVQSGAEVKKPGASVKVSCKASGYRFTHYWIHWVRQAPGQGLEWIGGINPGNNYAHHRRKFQGRVTMTADTSTSTVYMELSSLRSEDTAVYYCTREGYGNYGAWFAYWGQGTLVTVSS

SEQ ID NO: 100 - protein, 121 aa, Artificial Sequence
  source: /note="Description of Artificial Sequence: Synthetic polypeptide"
  source: /note="Heavy Chain Combinations of Inotuzumab IgG histidine scanning variant #17"
EVQLVQSGAEVKKPGASVKVSCKASGYRFTNYWIHWVRQAPGQGLEWIGGHNPGNHYAHYRRKFQGRVTMTADTSTSTVYMELSSLRSEDTAVYYCTREGYGNYGAWFAYWGQGTLVTVSS

SEQ ID NO: 101 - protein, 121 aa, Artificial Sequence
  source: /note="Description of Artificial Sequence: Synthetic polypeptide"
  source: /note="Heavy Chain Combinations of Inotuzumab IgG histidine scanning variant #18"
EVQLVQSGAEVKKPGASVKVSCKASGYRFTNYWIHWVRQAPGQGLEWIGGHNPGNHYATHRRKFQGRVTMTADTSTSTVYMELSSLRSEDTAVYYCTREGYGNYGAWFAYWGQGTLVTVSS

SEQ ID NO: 102 - protein, 121 aa, Artificial Sequence
  source: /note="Description of Artificial Sequence: Synthetic polypeptide"
  source: /note="Heavy Chain Combinations of Inotuzumab IgG histidine scanning variant #19"
EVQLVQSGAEVKKPGASVKVSCKASGYRFTNYWIHWVRQAPGQGLEWIGGINPGNHYAHHRRKFQGRVTMTADTSTSTVYMELSSLRSEDTAVYYCTREGYGNYGAWFAYWGQGTLVTVSS

SEQ ID NO: 103 - protein, 121 aa, Artificial Sequence
  source: /note="Description of Artificial Sequence: Synthetic polypeptide"
  source: /note="Heavy Chain Combinations of Inotuzumab IgG histidine scanning variant #20"
EVQLVQSGAEVKKPGASVKVSCKASGYRFTNYWIHWVRQAPGQGLEWIGGHNPGNNYAHHRRKFQGRVTMTADTSTSTVYMELSSLRSEDTAVYYCTREGYGNYGAWFAYWGQGTLVTVSS

SEQ ID NO: 104 - protein, 121 aa, Artificial Sequence
  source: /note="Description of Artificial Sequence: Synthetic polypeptide"
  source: /note="Heavy Chain Combinations of Inotuzumab IgG histidine scanning variant #21"
EVQLVQSGAEVKKPGASVKVSCKASGYRFTHYWIHWVRQAPGQGLEWIGGIHPGNNYATYRRKFQGRVTMTADTSTSTVYMELSSLRSEDTAVYYCTREGYGNYGAWFAYWGQGTLVTVSS

SEQ ID NO: 105 - protein, 121 aa, Artificial Sequence
  source: /note="Description of Artificial Sequence: Synthetic polypeptide"
  source: /note="Heavy Chain Combinations of Inotuzumab IgG histidine scanning variant #22"
EVQLVQSGAEVKKPGASVKVSCKASGYRFTHYWIHWVRQAPGQGLEWIGGINPGNNHATYRRKFQGRVTMTADTSTSTVYMELSSLRSEDTAVYYCTREGYGNYGAWFAYWGQGTLVTVSS

SEQ ID NO: 106 - protein, 121 aa, Artificial Sequence; identical to SEQ ID NO: 86
  source: /note="Description of Artificial Sequence: Synthetic polypeptide"
  source: /note="Heavy Chain Combinations of Inotuzumab IgG histidine scanning variant #23"

SEQ ID NO: 107 - protein, 121 aa, Artificial Sequence
  source: /note="Description of Artificial Sequence: Synthetic polypeptide"
  source: /note="Heavy Chain Combinations of Inotuzumab IgG histidine scanning variant #24"
EVQLVQSGAEVKKPGASVKVSCKASGYRFTHYWIHWVRQAPGQGLEWIGGINPGNNYATYRRHFQGRVTMTADTSTSTVYMELSSLRSEDTAVYYCTREGYGNYGAWFAYWGQGTLVTVSS

SEQ ID NO: 108 - protein, 121 aa, Artificial Sequence
  source: /note="Description of Artificial Sequence: Synthetic polypeptide"
  source: /note="Heavy Chain Combinations of Inotuzumab IgG histidine scanning variant #25"
EVQLVQSGAEVKKPGASVKVSCKASGYRFTHYWIHWVRQAPGQGLEWIGGINPGNNYATYRRKFQGRVTMTADTSTSTVYMELSSLRSEDTAVYYCTREGYGHYGAWFAYWGQGTLVTVSS

SEQ ID NO: 109 - protein, 121 aa, Artificial Sequence
  source: /note="Description of Artificial Sequence: Synthetic polypeptide"
  source: /note="Heavy Chain Combinations of Inotuzumab IgG histidine scanning variant #26"
EVQLVQSGAEVKKPGASVKVSCKASGYRFTNYWIHWVRQAPGQGLEWIGGIHPGNNHATYRRKFQGRVTMTADTSTSTVYMELSSLRSEDTAVYYCTREGYGNYGAWFAYWGQGTLVTVSS

SEQ ID NO: 110 - protein, 121 aa, Artificial Sequence
  source: /note="Description of Artificial Sequence: Synthetic polypeptide"
  source: /note="Heavy Chain Combinations of Inotuzumab IgG histidine scanning variant #27"
EVQLVQSGAEVKKPGASVKVSCKASGYRFTNYWIHWVRQAPGQGLEWIGGIHPGNNYAHYRRKFQGRVTMTADTSTSTVYMELSSLRSEDTAVYYCTREGYGNYGAWFAYWGQGTLVTVSS

SEQ ID NO: 111 - protein, 121 aa, Artificial Sequence
  source: /note="Description of Artificial Sequence: Synthetic polypeptide"
  source: /note="Heavy Chain Combinations of Inotuzumab IgG histidine scanning variant #28"
EVQLVQSGAEVKKPGASVKVSCKASGYRFTNYWIHWVRQAPGQGLEWIGGIHPGNNYATYRRHFQGRVTMTADTSTSTVYMELSSLRSEDTAVYYCTREGYGNYGAWFAYWGQGTLVTVSS

SEQ ID NO: 112 - protein, 121 aa, Artificial Sequence
  source: /note="Description of Artificial Sequence: Synthetic polypeptide"
  source: /note="Heavy Chain Combinations of Inotuzumab IgG histidine scanning variant #29"
EVQLVQSGAEVKKPGASVKVSCKASGYRFTNYWIHWVRQAPGQGLEWIGGIHPGNNYATYRRKFQGRVTMTADTSTSTVYMELSSLRSEDTAVYYCTREGYGHYGAWFAYWGQGTLVTVSS

SEQ ID NO: 113 - protein, 121 aa, Artificial Sequence
  source: /note="Description of Artificial Sequence: Synthetic polypeptide"
  source: /note="Heavy Chain Combinations of Inotuzumab IgG histidine scanning variant #30"
EVQLVQSGAEVKKPGASVKVSCKASGYRFTNYWIHWVRQAPGQGLEWIGGINPGNNHAHYRRKFQGRVTMTADTSTSTVYMELSSLRSEDTAVYYCTREGYGNYGAWFAYWGQGTLVTVSS

SEQ ID NO: 114 - protein, 121 aa, Artificial Sequence
  source: /note="Description of Artificial Sequence: Synthetic polypeptide"
  source: /note="Heavy Chain Combinations of Inotuzumab IgG histidine scanning variant #31"
EVQLVQSGAEVKKPGASVKVSCKASGYRFTNYWIHWVRQAPGQGLEWIGGINPGNNHATYRRHFQGRVTMTADTSTSTVYMELSSLRSEDTAVYYCTREGYGNYGAWFAYWGQGTLVTVSS

SEQ ID NO: 115 - protein, 121 aa, Artificial Sequence
  source: /note="Description of Artificial Sequence: Synthetic polypeptide"
  source: /note="Heavy Chain Combinations of Inotuzumab IgG histidine scanning variant #32"
EVQLVQSGAEVKKPGASVKVSCKASGYRFTNYWIHWVRQAPGQGLEWIGGINPGNNHATYRRKFQGRVTMTADTSTSTVYMELSSLRSEDTAVYYCTREGYGHYGAWFAYWGQGTLVTVSS

SEQ ID NO: 116 - protein, 121 aa, Artificial Sequence
  source: /note="Description of Artificial Sequence: Synthetic polypeptide"
  source: /note="Heavy Chain Combinations of Inotuzumab IgG histidine scanning variant #33"
EVQLVQSGAEVKKPGASVKVSCKASGYRFTNYWIHWVRQAPGQGLEWIGGINPGNNYAHYRRHFQGRVTMTADTSTSTVYMELSSLRSEDTAVYYCTREGYGNYGAWFAYWGQGTLVTVSS

SEQ ID NO: 117 - protein, 121 aa, Artificial Sequence
  source: /note="Description of Artificial Sequence: Synthetic polypeptide"
  source: /note="Heavy Chain Combinations of Inotuzumab IgG histidine scanning variant #34"
EVQLVQSGAEVKKPGASVKVSCKASGYRFTNYWIHWVRQAPGQGLEWIGGINPGNNYAHYRRKFQGRVTMTADTSTSTVYMELSSLRSEDTAVYYCTREGYGHYGAWFAYWGQGTLVTVSS

SEQ ID NO: 118 - protein, 121 aa, Artificial Sequence
  source: /note="Description of Artificial Sequence: Synthetic polypeptide"
  source: /note="Heavy Chain Combinations of Inotuzumab IgG histidine scanning variant #35"
EVQLVQSGAEVKKPGASVKVSCKASGYRFTNYWIHWVRQAPGQGLEWIGGINPGNNYATYRRHFQGRVTMTADTSTSTVYMELSSLRSEDTAVYYCTREGYGHYGAWFAYWGQGTLVTVSS

SEQ ID NO: 119 - protein, 121 aa, Artificial Sequence
  source: /note="Description of Artificial Sequence: Synthetic polypeptide"
  source: /note="Heavy Chain Combinations of Inotuzumab IgG histidine scanning variant #36"
EVQLVQSGAEVKKPGASVKVSCKASGYRFTHYWIHWVRQAPGQGLEWIGGIHPGNNHATYRRKFQGRVTMTADTSTSTVYMELSSLRSEDTAVYYCTREGYGNYGAWFAYWGQGTLVTVSS

SEQ ID NO: 120 - protein, 121 aa, Artificial Sequence
  source: /note="Description of Artificial Sequence: Synthetic polypeptide"
  source: /note="Heavy Chain Combinations of Inotuzumab IgG histidine scanning variant #37"
EVQLVQSGAEVKKPGASVKVSCKASGYRFTHYWIHWVRQAPGQGLEWIGGIHPGNNYAHYRRKFQGRVTMTADTSTSTVYMELSSLRSEDTAVYYCTREGYGNYGAWFAYWGQGTLVTVSS

SEQ ID NO: 121 - protein, 121 aa, Artificial Sequence
  source: /note="Description of Artificial Sequence: Synthetic polypeptide"
  source: /note="Heavy Chain Combinations of Inotuzumab IgG histidine scanning variant #38"
EVQLVQSGAEVKKPGASVKVSCKASGYRFTHYWIHWVRQAPGQGLEWIGGIHPGNNYATYRRHFQGRVTMTADTSTSTVYMELSSLRSEDTAVYYCTREGYGNYGAWFAYWGQGTLVTVSS

SEQ ID NO: 122 - protein, 121 aa, Artificial Sequence
  source: /note="Description of Artificial Sequence: Synthetic polypeptide"
  source: /note="Heavy Chain Combinations of Inotuzumab IgG histidine scanning variant #39"
EVQLVQSGAEVKKPGASVKVSCKASGYRFTHYWIHWVRQAPGQGLEWIGGIHPGNNYATYRRKFQGRVTMTADTSTSTVYMELSSLRSEDTAVYYCTREGYGHYGAWFAYWGQGTLVTVSS

SEQ ID NO: 123 - protein, 121 aa, Artificial Sequence
  source: /note="Description of Artificial Sequence: Synthetic polypeptide"
  source: /note="Heavy Chain Combinations of Inotuzumab IgG histidine scanning variant #40"
EVQLVQSGAEVKKPGASVKVSCKASGYRFTHYWIHWVRQAPGQGLEWIGGINPGNNHAHYRRKFQGRVTMTADTSTSTVYMELSSLRSEDTAVYYCTREGYGNYGAWFAYWGQGTLVTVSS

SEQ ID NO: 124 - protein, 121 aa, Artificial Sequence
  source: /note="Description of Artificial Sequence: Synthetic polypeptide"
  source: /note="Heavy Chain Combinations of Inotuzumab IgG histidine scanning variant #41"
EVQLVQSGAEVKKPGASVKVSCKASGYRFTHYWIHWVRQAPGQGLEWIGGINPGNNHATYRRHFQGRVTMTADTSTSTVYMELSSLRSEDTAVYYCTREGYGNYGAWFAYWGQGTLVTVSS

SEQ ID NO: 125 - protein, 121 aa, Artificial Sequence
  source: /note="Description of Artificial Sequence: Synthetic polypeptide"
  source: /note="Heavy Chain Combinations of Inotuzumab IgG histidine scanning variant #42"
EVQLVQSGAEVKKPGASVKVSCKASGYRFTHYWIHWVRQAPGQGLEWIGGINPGNNHATYRRKFQGRVTMTADTSTSTVYMELSSLRSEDTAVYYCTREGYGHYGAWFAYWGQGTLVTVSS

SEQ ID NO: 126 - protein, 121 aa, Artificial Sequence
  source: /note="Description of Artificial Sequence: Synthetic polypeptide"
  source: /note="Heavy Chain Combinations of Inotuzumab IgG histidine scanning variant #43"
EVQLVQSGAEVKKPGASVKVSCKASGYRFTHYWIHWVRQAPGQGLEWIGGINPGNNYAHYRRHFQGRVTMTADTSTSTVYMELSSLRSEDTAVYYCTREGYGNYGAWFAYWGQGTLVTVSS

SEQ ID NO: 127 - protein, 121 aa, Artificial Sequence
  source: /note="Description of Artificial Sequence: Synthetic polypeptide"
  source: /note="Heavy Chain Combinations of Inotuzumab IgG histidine scanning variant #44"
EVQLVQSGAEVKKPGASVKVSCKASGYRFTHYWIHWVRQAPGQGLEWIGGINPGNNYAHYRRKFQGRVTMTADTSTSTVYMELSSLRSEDTAVYYCTREGYGHYGAWFAYWGQGTLVTVSS

SEQ ID NO: 128 - protein, 121 aa, Artificial Sequence
  source: /note="Description of Artificial Sequence: Synthetic polypeptide"
  source: /note="Heavy Chain Combinations of Inotuzumab IgG histidine scanning variant #45"
EVQLVQSGAEVKKPGASVKVSCKASGYRFTHYWIHWVRQAPGQGLEWIGGINPGNNYATYRRHFQGRVTMTADTSTSTVYMELSSLRSEDTAVYYCTREGYGHYGAWFAYWGQGTLVTVSS

SEQ ID NO: 129 - protein, 121 aa, Artificial Sequence
  source: /note="Description of Artificial Sequence: Synthetic polypeptide"
  source: /note="Heavy Chain Combinations of Inotuzumab IgG histidine scanning variant #46"
EVQLVQSGAEVKKPGASVKVSCKASGYRFTNYWIHWVRQAPGQGLEWIGGIHPGNNHAHYRRKFQGRVTMTADTSTSTVYMELSSLRSEDTAVYYCTREGYGNYGAWFAYWGQGTLVTVSS

SEQ ID NO: 130 - protein, 121 aa, Artificial Sequence
  source: /note="Description of Artificial Sequence: Synthetic polypeptide"
  source: /note="Heavy Chain Combinations of Inotuzumab IgG histidine scanning variant #47"
EVQLVQSGAEVKKPGASVKVSCKASGYRFTNYWIHWVRQAPGQGLEWIGGIHPGNNHATYRRHFQGRVTMTADTSTSTVYMELSSLRSEDTAVYYCTREGYGNYGAWFAYWGQGTLVTVSS

SEQ ID NO: 131 - protein, 121 aa, Artificial Sequence
  source: /note="Description of Artificial Sequence: Synthetic polypeptide"
  source: /note="Heavy Chain Combinations of Inotuzumab IgG histidine scanning variant #48"
EVQLVQSGAEVKKPGASVKVSCKASGYRFTNYWIHWVRQAPGQGLEWIGGIHPGNNHATYRRKFQGRVTMTADTSTSTVYMELSSLRSEDTAVYYCTREGYGHYGAWFAYWGQGTLVTVSS

SEQ ID NO: 132 - protein, 121 aa, Artificial Sequence
  source: /note="Description of Artificial Sequence: Synthetic polypeptide"
  source: /note="Heavy Chain Combinations of Inotuzumab IgG histidine scanning variant #49"
EVQLVQSGAEVKKPGASVKVSCKASGYRFTNYWIHWVRQAPGQGLEWIGGIHPGNNYAHYRRHFQGRVTMTADTSTSTVYMELSSLRSEDTAVYYCTREGYGNYGAWFAYWGQGTLVTVSS

SEQ ID NO: 133 - protein, 121 aa, Artificial Sequence
  source: /note="Description of Artificial Sequence: Synthetic polypeptide"
  source: /note="Heavy Chain Combinations of Inotuzumab IgG histidine scanning variant #50"
EVQLVQSGAEVKKPGASVKVSCKASGYRFTNYWIHWVRQAPGQGLEWIGGIHPGNNYAHYRRKFQGRVTMTADTSTSTVYMELSSLRSEDTAVYYCTREGYGHYGAWFAYWGQGTLVTVSS

SEQ ID NO: 134 - protein, 121 aa, Artificial Sequence
  source: /note="Description of Artificial Sequence: Synthetic polypeptide"
  source: /note="Heavy Chain Combinations of Inotuzumab IgG histidine scanning variant #51"
EVQLVQSGAEVKKPGASVKVSCKASGYRFTNYWIHWVRQAPGQGLEWIGGIHPGNNYATYRRHFQGRVTMTADTSTSTVYMELSSLRSEDTAVYYCTREGYGHYGAWFAYWGQGTLVTVSS

SEQ ID NO: 135 - protein, 121 aa, Artificial Sequence
  source: /note="Description of Artificial Sequence: Synthetic polypeptide"
  source: /note="Heavy Chain Combinations of Inotuzumab IgG histidine scanning variant #52"
EVQLVQSGAEVKKPGASVKVSCKASGYRFTNYWIHWVRQAPGQGLEWIGGINPGNNHAHYRRHFQGRVTMTADTSTSTVYMELSSLRSEDTAVYYCTREGYGNYGAWFAYWGQGTLVTVSS

SEQ ID NO: 136 - protein, 121 aa, Artificial Sequence
  source: /note="Description of Artificial Sequence: Synthetic polypeptide"
  source: /note="Heavy Chain Combinations of Inotuzumab IgG histidine scanning variant #53"
EVQLVQSGAEVKKPGASVKVSCKASGYRFTNYWIHWVRQAPGQGLEWIGGINPGNNHAHYRRKFQGRVTMTADTSTSTVYMELSSLRSEDTAVYYCTREGYGHYGAWFAYWGQGTLVTVSS

SEQ ID NO: 137 - protein, 121 aa, Artificial Sequence
  source: /note="Description of Artificial Sequence: Synthetic polypeptide"
  source: /note="Heavy Chain Combinations of Inotuzumab IgG histidine scanning variant #54"
EVQLVQSGAEVKKPGASVKVSCKASGYRFTNYWIHWVRQAPGQGLEWIGGINPGNNHATYRRHFQGRVTMTADTSTSTVYMELSSLRSEDTAVYYCTREGYGHYGAWFAYWGQGTLVTVSS

SEQ ID NO: 138 - protein, 121 aa, Artificial Sequence
  source: /note="Description of Artificial Sequence: Synthetic polypeptide"
  source: /note="Heavy Chain Combinations of Inotuzumab IgG histidine scanning variant #55"
EVQLVQSGAEVKKPGASVKVSCKASGYRFTNYWIHWVRQAPGQGLEWIGGINPGNNYAHYRRHFQGRVTMTADTSTSTVYMELSSLRSEDTAVYYCTREGYGHYGAWFAYWGQGTLVTVSS

SEQ ID NO: 139 - protein, 112 aa, Artificial Sequence
  source: /note="Description of Artificial Sequence: Synthetic polypeptide"
  source: /note="Light Chain Combinations of Inotuzumab IgG histidine scanning variant #1"
DVQVTQSPSSLSASVGDRVTITCRSSQSLHNSHGNTFLSWYLHKPGKAPQLLIYGISNRFSGVPDRFSGSGSGTDFTLTISSLQPEDFATYYCLQGTHQPYTFGQGTKVEIK

SEQ ID NO: 140 - protein, 112 aa, Artificial Sequence
  source: /note="Description of Artificial Sequence: Synthetic polypeptide"
  source: /note="Light Chain Combinations of Inotuzumab IgG histidine scanning variant #2"
DVQVTQSPSSLSASVGDRVTITCRSSQSLHNSYGHTFLSWYLHKPGKAPQLLIYGISNRFSGVPDRFSGSGSGTDFTLTISSLQPEDFATYYCLQGTHQPYTFGQGTKVEIK

SEQ ID NO: 141 - protein, 112 aa, Artificial Sequence
  source: /note="Description of Artificial Sequence: Synthetic polypeptide"
  source: /note="Light Chain Combinations of Inotuzumab IgG histidine scanning variant #3"
DVQVTQSPSSLSASVGDRVTITCRSSQSLANSHGHTFLSWYLHKPGKAPQLLIYGISNRFSGVPDRFSGSGSGTDFTLTISSLQPEDFATYYCLQGTHQPYTFGQGTKVEIK

SEQ ID NO: 142 - protein, 112 aa, Artificial Sequence
  source: /note="Description of Artificial Sequence: Synthetic polypeptide"
  source: /note="Light Chain Combinations of Inotuzumab IgG histidine scanning variant #4"
DVQVTQSPSSLSASVGDRVTITCRSSQSLHNSHGHTFLSWYLHKPGKAPQLLIYGISNRFSGVPDRFSGSGSGTDFTLTISSLQPEDFATYYCLQGTHQPYTFGQGTKVEIK

SEQ ID NO: 143 - protein, 120 aa, Artificial Sequence
  source: /note="Description of Artificial Sequence: Synthetic polypeptide"
  source: /note="Heavy Chain of Pinatuzumab IgG"
EVQLVESGGGLVQPGGSLRLSCAASGYEFSRSWMNWVRQAPGKGLEWVGRIYPGDGDTNYSGKFKGRFTISADTSKNTAYLQMNSLRAEDTAVYYCARDGSSWDWYFDVWGQGTLVTVSS

SEQ ID NO: 144 - protein, 112 aa, Artificial Sequence
  source: /note="Description of Artificial Sequence: Synthetic polypeptide"
  source: /note="Light Chain of Pinatuzumab IgG"
DIQMTQSPSSLSASVGDRVTITCRSSQSIVHSVGNTFLEWYQQKPGKAPKLLIYKVSNRFSGVPSRFSGSGSGTDFTLTISSLQPEDFATYYCFQGSQFPYTFGQGTKVEIK

SEQ ID NO: 145 - protein, 10 aa, Artificial Sequence
  source: /note="Description of Artificial Sequence: Synthetic peptide"
  source: /note="Heavy Chain CDR1 of Pinatuzumab"
GYEFSRSWMN

SEQ ID NO: 146 - protein, 17 aa, Artificial Sequence
  source: /note="Description of Artificial Sequence: Synthetic peptide"
  source: /note="Heavy Chain CDR2 of Pinatuzumab"
RIYPGDGDTNYSGKFKG

SEQ ID NO: 147 - protein, 13 aa, Artificial Sequence
  source: /note="Description of Artificial Sequence: Synthetic peptide"
  source: /note="Heavy Chain CDR3 of Pinatuzumab"
ARDGSSWDWYFDV

SEQ ID NO: 148 - protein, 16 aa, Artificial Sequence
  source: /note="Description of Artificial Sequence: Synthetic peptide"
  source: /note="Light Chain CDR1 of Pinatuzumab"
RSSQSIVHSVGNTFLE

SEQ ID NO: 149 - protein, 7 aa, Artificial Sequence
  source: /note="Description of Artificial Sequence: Synthetic peptide"
  source: /note="Light Chain CDR2 of Pinatuzumab"
KVSNRFS

SEQ ID NO: 150 - protein, 8 aa, Artificial Sequence
  source: /note="Description of Artificial Sequence: Synthetic peptide"
  source: /note="Light Chain CDR3 of Pinatuzumab"
FQGSQFPY

SEQ ID NO: 151 - protein, 120 aa, Artificial Sequence
  source: /note="Description of Artificial Sequence: Synthetic polypeptide"
  source: /note="Heavy Chain of Pinatuzumab IgG histidine scanning variant #1"
EVQLVESGGGLVQPGGSLRLSCAASHYEFSRSWMNWVRQAPGKGLEWVGRIYPGDGDTNYSGKFKGRFTISADTSKNTAYLQMNSLRAEDTAVYYCARDGSSWDWYFDVWGQGTLVTVSS

SEQ ID NO: 152 - protein, 120 aa, Artificial Sequence
  source: /note="Description of Artificial Sequence: Synthetic polypeptide"
  source: /note="Heavy Chain of Pinatuzumab IgG histidine scanning variant #2"
EVQLVESGGGLVQPGGSLRLSCAASGHEFSRSWMNWVRQAPGKGLEWVGRIYPGDGDTNYSGKFKGRFTISADTSKNTAYLQMNSLRAEDTAVYYCARDGSSWDWYFDVWGQGTLVTVSS

SEQ ID NO: 153 - protein, 120 aa, Artificial Sequence
  source: /note="Description of Artificial Sequence: Synthetic polypeptide"
  source: /note="Heavy Chain of Pinatuzumab IgG histidine scanning variant #3"
EVQLVESGGGLVQPGGSLRLSCAASGYHFSRSWMNWVRQAPGKGLEWVGRIYPGDGDTNYSGKFKGRFTISADTSKNTAYLQMNSLRAEDTAVYYCARDGSSWDWYFDVWGQGTLVTVSS

SEQ ID NO: 154 - protein, 120 aa, Artificial Sequence
  source: /note="Description of Artificial Sequence: Synthetic polypeptide"
  source: /note="Heavy Chain of Pinatuzumab IgG histidine scanning variant #4"
EVQLVESGGGLVQPGGSLRLSCAASGYEHSRSWMNWVRQAPGKGLEWVGRIYPGDGDTNYSGKFKGRFTISADTSKNTAYLQMNSLRAEDTAVYYCARDGSSWDWYFDVWGQGTLVTVSS

SEQ ID NO: 155 - protein, 120 aa, Artificial Sequence
  source: /note="Description of Artificial Sequence: Synthetic polypeptide"
  source: /note="Heavy Chain of Pinatuzumab IgG histidine scanning variant #5"
EVQLVESGGGLVQPGGSLRLSCAASGYEFHRSWMNWVRQAPGKGLEWVGRIYPGDGDTNYSGKFKGRFTISADTSKNTAYLQMNSLRAEDTAVYYCARDGSSWDWYFDVWGQGTLVTVSS

SEQ ID NO: 156 - protein, 120 aa, Artificial Sequence
  source: /note="Description of Artificial Sequence: Synthetic polypeptide"
  source: /note="Heavy Chain of Pinatuzumab IgG histidine scanning variant #6"
EVQLVESGGGLVQPGGSLRLSCAASGYEFSHSWMNWVRQAPGKGLEWVGRIYPGDGDTNYSGKFKGRFTISADTSKNTAYLQMNSLRAEDTAVYYCARDGSSWDWYFDVWGQGTLVTVSS

SEQ ID NO: 157 - protein, 120 aa, Artificial Sequence
  source: /note="Description of Artificial Sequence: Synthetic polypeptide"
  source: /note="Heavy Chain of Pinatuzumab IgG histidine scanning variant #7"
EVQLVESGGGLVQPGGSLRLSCAASGYEFSRHWMNWVRQAPGKGLEWVGRIYPGDGDTNYSGKFKGRFTISADTSKNTAYLQMNSLRAEDTAVYYCARDGSSWDWYFDVWGQGTLVTVSS

SEQ ID NO: 158 - protein, 120 aa, Artificial Sequence
  source: /note="Description of Artificial Sequence: Synthetic polypeptide"
  source: /note="Heavy Chain of Pinatuzumab IgG histidine scanning variant #8"
EVQLVESGGGLVQPGGSLRLSCAASGYEFSRSHMNWVRQAPGKGLEWVGRIYPGDGDTNYSGKFKGRFTISADTSKNTAYLQMNSLRAEDTAVYYCARDGSSWDWYFDVWGQGTLVTVSS

SEQ ID NO: 159 - protein, 120 aa, Artificial Sequence
  source: /note="Description of Artificial Sequence: Synthetic polypeptide"
  source: /note="Heavy Chain of Pinatuzumab IgG histidine scanning variant #9"
EVQLVESGGGLVQPGGSLRLSCAASGYEFSRSWHNWVRQAPGKGLEWVGRIYPGDGDTNYSGKFKGRFTISADTSKNTAYLQMNSLRAEDTAVYYCARDGSSWDWYFDVWGQGTLVTVSS

SEQ ID NO: 160 - protein, 120 aa, Artificial Sequence
  source: /note="Description of Artificial Sequence: Synthetic polypeptide"
  source: /note="Heavy Chain of Pinatuzumab IgG histidine scanning variant #10"
EVQLVESGGGLVQPGGSLRLSCAASGYEFSRSWMHWVRQAPGKGLEWVGRIYPGDGDTNYSGKFKGRFTISADTSKNTAYLQMNSLRAEDTAVYYCARDGSSWDWYFDVWGQGTLVTVSS

SEQ ID NO: 161 - protein, 120 aa, Artificial Sequence
  source: /note="Description of Artificial Sequence: Synthetic polypeptide"
  source: /note="Heavy Chain of Pinatuzumab IgG histidine scanning variant #11"
EVQLVESGGGLVQPGGSLRLSCAASGYEFSRSWMNWVRQAPGKGLEWVGHIYPGDGDTNYSGKFKGRFTISADTSKNTAYLQMNSLRAEDTAVYYCARDGSSWDWYFDVWGQGTLVTVSS

SEQ ID NO: 162 - protein, 120 aa, Artificial Sequence
  source: /note="Description of Artificial Sequence: Synthetic polypeptide"
  source: /note="Heavy Chain of Pinatuzumab IgG histidine scanning variant #12"
EVQLVESGGGLVQPGGSLRLSCAASGYEFSRSWMNWVRQAPGKGLEWVGRHYPGDGDTNYSGKFKGRFTISADTSKNTAYLQMNSLRAEDTAVYYCARDGSSWDWYFDVWGQGTLVTVSS

SEQ ID NO: 163 - protein, 120 aa, Artificial Sequence
  source: /note="Description of Artificial Sequence: Synthetic polypeptide"
  source: /note="Heavy Chain of Pinatuzumab IgG histidine scanning variant #13"
EVQLVESGGGLVQPGGSLRLSCAASGYEFSRSWMNWVRQAPGKGLEWVGRIHPGDGDTNYSGKFKGRFTISADTSKNTAYLQMNSLRAEDTAVYYCARDGSSWDWYFDVWGQGTLVTVSS

SEQ ID NO: 164 - protein, 120 aa, Artificial Sequence
  source: /note="Description of Artificial Sequence: Synthetic polypeptide"
  source: /note="Heavy Chain of Pinatuzumab IgG histidine scanning variant #14"
EVQLVESGGGLVQPGGSLRLSCAASGYEFSRSWMNWVRQAPGKGLEWVGRIYHGDGDTNYSGKFKGRFTISADTSKNTAYLQMNSLRAEDTAVYYCARDGSSWDWYFDVWGQGTLVTVSS

SEQ ID NO: 165 - protein, 120 aa, Artificial Sequence
  source: /note="Description of Artificial Sequence: Synthetic polypeptide"
  source: /note="Heavy Chain of Pinatuzumab IgG histidine scanning variant #15"
EVQLVESGGGLVQPGGSLRLSCAASGYEFSRSWMNWVRQAPGKGLEWVGRIYPHDGDTNYSGKFKGRFTISADTSKNTAYLQMNSLRAEDTAVYYCARDGSSWDWYFDVWGQGTLVTVSS

SEQ ID NO: 166 - protein, 120 aa, Artificial Sequence
  source: /note="Description of Artificial Sequence: Synthetic polypeptide"
  source: /note="Heavy Chain of Pinatuzumab IgG histidine scanning variant #16"
EVQLVESGGGLVQPGGSLRLSCAASGYEFSRSWMNWVRQAPGKGLEWVGRIYPGHGDTNYSGKFKGRFTISADTSKNTAYLQMNSLRAEDTAVYYCARDGSSWDWYFDVWGQGTLVTVSS

SEQ ID NO: 167 - protein, 120 aa, Artificial Sequence
  source: /note="Description of Artificial Sequence: Synthetic polypeptide"
  source: /note="Heavy Chain of Pinatuzumab IgG histidine scanning variant #17"
EVQLVESGGGLVQPGGSLRLSCAASGYEFSRSWMNWVRQAPGKGLEWVGRIYPGDHDTNYSGKFKGRFTISADTSKNTAYLQMNSLRAEDTAVYYCARDGSSWDWYFDVWGQGTLVTVSS

SEQ ID NO: 168 - protein, 120 aa, Artificial Sequence
  source: /note="Description of Artificial Sequence: Synthetic polypeptide"
  source: /note="Heavy Chain of Pinatuzumab IgG histidine scanning variant #18"
EVQLVESGGGLVQPGGSLRLSCAASGYEFSRSWMNWVRQAPGKGLEWVGRIYPGDGHTNYSGKFKGRFTISADTSKNTAYLQMNSLRAEDTAVYYCARDGSSWDWYFDVWGQGTLVTVSS

SEQ ID NO: 169 - protein, 120 aa, Artificial Sequence
  source: /note="Description of Artificial Sequence: Synthetic polypeptide"
  source: /note="Heavy Chain of Pinatuzumab IgG histidine scanning variant #19"
EVQLVESGGGLVQPGGSLRLSCAASGYEFSRSWMNWVRQAPGKGLEWVGRIYPGDGDHNYSGKFKGRFTISADTSKNTAYLQMNSLRAEDTAVYYCARDGSSWDWYFDVWGQGTLVTVSS

SEQ ID NO: 170 - protein, 120 aa, Artificial Sequence
  source: /note="Description of Artificial Sequence: Synthetic polypeptide"
  source: /note="Heavy Chain of Pinatuzumab IgG histidine scanning variant #20"
EVQLVESGGGLVQPGGSLRLSCAASGYEFSRSWMNWVRQAPGKGLEWVGRIYPGDGDTHYSGKFKGRFTISADTSKNTAYLQMNSLRAEDTAVYYCARDGSSWDWYFDVWGQGTLVTVSS

SEQ ID NO: 171 - protein, 120 aa, Artificial Sequence
  source: /note="Description of Artificial Sequence: Synthetic polypeptide"
  source: /note="Heavy Chain of Pinatuzumab IgG histidine scanning variant #21"
EVQLVESGGGLVQPGGSLRLSCAASGYEFSRSWMNWVRQAPGKGLEWVGRIYPGDGDTNHSGKFKGRFTISADTSKNTAYLQMNSLRAEDTAVYYCARDGSSWDWYFDVWGQGTLVTVSS

SEQ ID NO: 172 - protein, 120 aa, Artificial Sequence
  source: /note="Description of Artificial Sequence: Synthetic polypeptide"
  source: /note="Heavy Chain of Pinatuzumab IgG histidine scanning variant #22"
EVQLVESGGGLVQPGGSLRLSCAASGYEFSRSWMNWVRQAPGKGLEWVGRIYPGDGDTNYHGKFKGRFTISADTSKNTAYLQMNSLRAEDTAVYYCARDGSSWDWYFDVWGQGTLVTVSS

SEQ ID NO: 173 - protein, 120 aa, Artificial Sequence
  source: /note="Description of Artificial Sequence: Synthetic polypeptide"
  source: /note="Heavy Chain of Pinatuzumab IgG histidine scanning variant #23"
EVQLVESGGGLVQPGGSLRLSCAASGYEFSRSWMNWVRQAPGKGLEWVGRIYPGDGDTNYSHKFKGRFTISADTSKNTAYLQMNSLRAEDTAVYYCARDGSSWDWYFDVWGQGTLVTVSS

SEQ ID NO: 174 - protein, 120 aa, Artificial Sequence
  source: /note="Description of Artificial Sequence: Synthetic polypeptide"
  source: /note="Heavy Chain of Pinatuzumab IgG histidine scanning variant #24"
EVQLVESGGGLVQPGGSLRLSCAASGYEFSRSWMNWVRQAPGKGLEWVGRIYPGDGDTNYSGHFKGRFTISADTSKNTAYLQMNSLRAEDTAVYYCARDGSSWDWYFDVWGQGTLVTVSS

SEQ ID NO: 175 - protein, 120 aa, Artificial Sequence
  source: /note="Description of Artificial Sequence: Synthetic polypeptide"
  source: /note="Heavy Chain of Pinatuzumab IgG histidine scanning variant #25"
EVQLVESGGGLVQPGGSLRLSCAASGYEFSRSWMNWVRQAPGKGLEWVGRIYPGDGDTNYSGKHKGRFTISADTSKNTAYLQMNSLRAEDTAVYYCARDGSSWDWYFDVWGQGTLVTVSS

SEQ ID NO: 176 - protein, 120 aa, Artificial Sequence
  source: /note="Description of Artificial Sequence: Synthetic polypeptide"
  source: /note="Heavy Chain of Pinatuzumab IgG histidine scanning variant #26"
EVQLVESGGGLVQPGGSLRLSCAASGYEFSRSWMNWVRQAPGKGLEWVGRIYPGDGDTNYSGKFHGRFTISADTSKNTAYLQMNSLRAEDTAVYYCARDGSSWDWYFDVWGQGTLVTVSS

SEQ ID NO: 177 - protein, 120 aa, Artificial Sequence
  source: /note="Description of Artificial Sequence: Synthetic polypeptide"
  source: /note="Heavy Chain of Pinatuzumab IgG histidine scanning variant #27"
EVQLVESGGGLVQPGGSLRLSCAASGYEFSRSWMNWVRQAPGKGLEWVGRIYPGDGDTNYSGKFKHRFTISADTSKNTAYLQMNSLRAEDTAVYYCARDGSSWDWYFDVWGQGTLVTVSS

SEQ ID NO: 178 - protein, 120 aa, Artificial Sequence
  source: /note="Description of Artificial Sequence: Synthetic polypeptide"
  source: /note="Heavy Chain of Pinatuzumab IgG histidine scanning variant #28"
EVQLVESGGGLVQPGGSLRLSCAASGYEFSRSWMNWVRQAPGKGLEWVGRIYPGDGDTNYSGKFKGRFTISADTSKNTAYLQMNSLRAEDTAVYYCHRDGSSWDWYFDVWGQGTLVTVSS

SEQ ID NO: 179 - protein, 120 aa, Artificial Sequence
  source: /note="Description of Artificial Sequence: Synthetic polypeptide"
  source: /note="Heavy Chain of Pinatuzumab IgG histidine scanning variant #29"
EVQLVESGGGLVQPGGSLRLSCAASGYEFSRSWMNWVRQAPGKGLEWVGRIYPGDGDTNYSGKFKGRFTISADTSKNTAYLQMNSLRAEDTAVYYCAHDGSSWDWYFDVWGQGTLVTVSS

SEQ ID NO: 180 - protein, 120 aa, Artificial Sequence
  source: /note="Description of Artificial Sequence: Synthetic polypeptide"
  source: /note="Heavy Chain of Pinatuzumab IgG histidine scanning variant #30"
EVQLVESGGGLVQPGGSLRLSCAASGYEFSRSWMNWVRQAPGKGLEWVGRIYPGDGDTNYSGKFKGRFTISADTSKNTAYLQMNSLRAEDTAVYYCARHGSSWDWYFDVWGQGTLVTVSS

SEQ ID NO: 181 - protein, 120 aa, Artificial Sequence
  source: /note="Description of Artificial Sequence: Synthetic polypeptide"
  source: /note="Heavy Chain of Pinatuzumab IgG histidine scanning variant #31"
EVQLVESGGGLVQPGGSLRLSCAASGYEFSRSWMNWVRQAPGKGLEWVGRIYPGDGDTNYSGKFKGRFTISADTSKNTAYLQMNSLRAEDTAVYYCARDHSSWDWYFDVWGQGTLVTVSS

SEQ ID NO: 182 - protein, 120 aa, Artificial Sequence
  source: /note="Description of Artificial Sequence: Synthetic polypeptide"
  source: /note="Heavy Chain of Pinatuzumab IgG histidine scanning variant #32"
EVQLVESGGGLVQPGGSLRLSCAASGYEFSRSWMNWVRQAPGKGLEWVGRIYPGDGDTNYSGKFKGRFTISADTSKNTAYLQMNSLRAEDTAVYYCARDGHSWDWYFDVWGQGTLVTVSS

SEQ ID NO: 183 - protein, 120 aa, Artificial Sequence
  source: /note="Description of Artificial Sequence: Synthetic polypeptide"
  source: /note="Heavy Chain of Pinatuzumab IgG histidine scanning variant #33"
EVQLVESGGGLVQPGGSLRLSCAASGYEFSRSWMNWVRQAPGKGLEWVGRIYPGDGDTNYSGKFKGRFTISADTSKNTAYLQMNSLRAEDTAVYYCARDGSHWDWYFDVWGQGTLVTVSS

SEQ ID NO: 184 - protein, 120 aa, Artificial Sequence
  source: /note="Description of Artificial Sequence: Synthetic polypeptide"
  source: /note="Heavy Chain of Pinatuzumab IgG histidine scanning variant #34"
EVQLVESGGGLVQPGGSLRLSCAASGYEFSRSWMNWVRQAPGKGLEWVGRIYPGDGDTNYSGKFKGRFTISADTSKNTAYLQMNSLRAEDTAVYYCARDGSSHDWYFDVWGQGTLVTVSS

SEQ ID NO: 185 - protein, 120 aa, Artificial Sequence
  source: /note="Description of Artificial Sequence: Synthetic polypeptide"
  source: /note="Heavy Chain of Pinatuzumab IgG histidine scanning variant #35"
EVQLVESGGGLVQPGGSLRLSCAASGYEFSRSWMNWVRQAPGKGLEWVGRIYPGDGDTNYSGKFKGRFTISADTSKNTAYLQMNSLRAEDTAVYYCARDGSSWHWYFDVWGQGTLVTVSS

SEQ ID NO: 186 - protein, 120 aa, Artificial Sequence
  source: /note="Description of Artificial Sequence: Synthetic polypeptide"
  source: /note="Heavy Chain of Pinatuzumab IgG histidine scanning variant #36"
EVQLVESGGGLVQPGGSLRLSCAASGYEFSRSWMNWVRQAPGKGLEWVGRIYPGDGDTNYSGKFKGRFTISADTSKNTAYLQMNSLRAEDTAVYYCARDGSSWDHYFDVWGQGTLVTVSS

SEQ ID NO: 187 - protein, 120 aa, Artificial Sequence
  source: /note="Description of Artificial Sequence: Synthetic polypeptide"
  source: /note="Heavy Chain of Pinatuzumab IgG histidine scanning variant #37"
EVQLVESGGGLVQPGGSLRLSCAASGYEFSRSWMNWVRQAPGKGLEWVGRIYPGDGDTNYSGKFKGRFTISADTSKNTAYLQMNSLRAEDTAVYYCARDGSSWDWHFDVWGQGTLVTVSS

SEQ ID NO: 188 - protein, 120 aa, Artificial Sequence
  source: /note="Description of Artificial Sequence: Synthetic polypeptide"
  source: /note="Heavy Chain of Pinatuzumab IgG histidine scanning variant #38"
EVQLVESGGGLVQPGGSLRLSCAASGYEFSRSWMNWVRQAPGKGLEWVGRIYPGDGDTNYSGKFKGRFTISADTSKNTAYLQMNSLRAEDTAVYYCARDGSSWDWYHDVWGQGTLVTVSS

SEQ ID NO: 189 - protein, 120 aa, Artificial Sequence
  source: /note="Description of Artificial Sequence: Synthetic polypeptide"
  source: /note="Heavy Chain of Pinatuzumab IgG histidine scanning variant #39"
EVQLVESGGGLVQPGGSLRLSCAASGYEFSRSWMNWVRQAPGKGLEWVGRIYPGDGDTNYSGKFKGRFTISADTSKNTAYLQMNSLRAEDTAVYYCARDGSSWDWYFHVWGQGTLVTVSS

SEQ ID NO: 190 - protein, 120 aa, Artificial Sequence
  source: /note="Description of Artificial Sequence: Synthetic polypeptide"
  source: /note="Heavy Chain of Pinatuzumab IgG histidine scanning variant #40"
EVQLVESGGGLVQPGGSLRLSCAASGYEFSRSWMNWVRQAPGKGLEWVGRIYPGDGDTNYSGKFKGRFTISADTSKNTAYLQMNSLRAEDTAVYYCARDGSSWDWYFDHWGQGTLVTVSS

SEQ ID NO: 191 - protein, 112 aa, Artificial Sequence
  source: /note="Description of Artificial Sequence: Synthetic polypeptide"
  source: /note="Light Chain of Pinatuzumab IgG histidine scanning variant #1"
DIQMTQSPSSLSASVGDRVTITCHSSQSIVHSVGNTFLEWYQQKPGKAPKLLIYKVSNRFSGVPSRFSGSGSGTDFTLTISSLQPEDFATYYCFQGSQFPYTFGQGTKVEIK

SEQ ID NO: 192 - protein, 112 aa, Artificial Sequence
  source: /note="Description of Artificial Sequence: Synthetic polypeptide"
  source: /note="Light Chain of Pinatuzumab IgG histidine scanning variant #2"
DIQMTQSPSSLSASVGDRVTITCRHSQSIVHSVGNTFLEWYQQKPGKAPKLLIYKVSNRFSGVPSRFSGSGSGTDFTLTISSLQPEDFATYYCFQGSQFPYTFGQGTKVEIK

SEQ ID NO: 193 - protein, 112 aa, Artificial Sequence
  source: /note="Description of Artificial Sequence: Synthetic polypeptide"
  source: /note="Light Chain of Pinatuzumab IgG histidine scanning variant #3"
DIQMTQSPSSLSASVGDRVTITCRSHQSIVHSVGNTFLEWYQQKPGKAPKLLIYKVSNRFSGVPSRFSGSGSGTDFTLTISSLQPEDFATYYCFQGSQFPYTFGQGTKVEIK

SEQ ID NO: 194 - protein, 112 aa, Artificial Sequence
  source: /note="Description of Artificial Sequence: Synthetic polypeptide"
  source: /note="Light Chain of Pinatuzumab IgG histidine scanning variant #4"
DIQMTQSPSSLSASVGDRVTITCRSSHSIVHSVGNTFLEWYQQKPGKAPKLLIYKVSNRFSGVPSRFSGSGSGTDFTLTISSLQPEDFATYYCFQGSQFPYTFGQGTKVEIK

SEQ ID NO: 195 - protein, 112 aa, Artificial Sequence
  source: /note="Description of Artificial Sequence: Synthetic polypeptide"
  source: /note="Light Chain of Pinatuzumab IgG histidine scanning variant #5"
DIQMTQSPSSLSASVGDRVTITCRSSQHIVHSVGNTFLEWYQQKPGKAPKLLIYKVSNRFSGVPSRFSGSGSGTDFTLTISSLQPEDFATYYCFQGSQFPYTFGQGTKVEIK

SEQ ID NO: 196 - protein, 112 aa, Artificial Sequence
  source: /note="Description of Artificial Sequence: Synthetic polypeptide"
  source: /note="Light Chain of Pinatuzumab IgG histidine scanning variant #6"
DIQMTQSPSSLSASVGDRVTITCRSSQSHVHSVGNTFLEWYQQKPGKAPKLLIYKVSNRFSGVPSRFSGSGSGTDFTLTISSLQPEDFATYYCFQGSQFPYTFGQGTKVEIK

SEQ ID NO: 197 - protein, 112 aa, Artificial Sequence
  source: /note="Description of Artificial Sequence: Synthetic polypeptide"
  source: /note="Light Chain of Pinatuzumab IgG histidine scanning variant #7"
DIQMTQSPSSLSASVGDRVTITCRSSQSIHHSVGNTFLEWYQQKPGKAPKLLIYKVSNRFSGVPSRFSGSGSGTDFTLTISSLQPEDFATYYCFQGSQFPYTFGQGTKVEIK

SEQ ID NO: 198 - protein, 112 aa, Artificial Sequence
  source: /note="Description of Artificial Sequence: Synthetic polypeptide"
  source: /note="Light Chain of Pinatuzumab IgG histidine scanning variant #8"
DIQMTQSPSSLSASVGDRVTITCRSSQSIVASVGNTFLEWYQQKPGKAPKLLIYKVSNRFSGVPSRFSGSGSGTDFTLTISSLQPEDFATYYCFQGSQFPYTFGQGTKVEIK

SEQ ID NO: 199 - protein, 112 aa, Artificial Sequence
  source: /note="Description of Artificial Sequence: Synthetic polypeptide"
  source: /note="Light Chain of Pinatuzumab IgG histidine scanning variant #9"
DIQMTQSPSSLSASVGDRVTITCRSSQSIVHHVGNTFLEWYQQKPGKAPKLLIYKVSNRFSGVPSRFSGSGSGTDFTLTISSLQPEDFATYYCFQGSQFPYTFGQGTKVEIK

SEQ ID NO: 200 - protein, 112 aa, Artificial Sequence
  source: /note="Description of Artificial Sequence: Synthetic polypeptide"
  source: /note="Light Chain of Pinatuzumab IgG histidine scanning variant #10"
DIQMTQSPSSLSASVGDRVTITCRSSQSIVHSHGNTFLEWYQQKPGKAPKLLIYKVSNRFSGVPSRFSGSGSGTDFTLTISSLQPEDFATYYCFQGSQFPYTFGQGTKVEIK

SEQ ID NO: 201 - protein, 112 aa, Artificial Sequence
  source: /note="Description of Artificial Sequence: Synthetic polypeptide"
  source: /note="Light Chain of Pinatuzumab IgG histidine scanning variant #11"
DIQMTQSPSSLSASVGDRVTITCRSSQSIVHSVHNTFLEWYQQKPGKAPKLLIYKVSNRFSGVPSRFSGSGSGTDFTLTISSLQPEDFATYYCFQGSQFPYTFGQGTKVEIK

SEQ ID NO: 202 - protein, 112 aa, Artificial Sequence
  source: /note="Description of Artificial Sequence: Synthetic polypeptide"
  source: /note="Light Chain of Pinatuzumab IgG histidine scanning variant #12"
DIQMTQSPSSLSASVGDRVTITCRSSQSIVHSVGHTFLEWYQQKPGKAPKLLIYKVSNRFSGVPSRFSGSGSGTDFTLTISSLQPEDFATYYCFQGSQFPYTFGQGTKVEIK

SEQ ID NO: 203 - protein, 112 aa, Artificial Sequence
  source: /note="Description of Artificial Sequence: Synthetic polypeptide"
  source: /note="Light Chain of Pinatuzumab IgG histidine scanning variant #13"
DIQMTQSPSSLSASVGDRVTITCRSSQSIVHSVGNHFLEWYQQKPGKAPKLLIYKVSNRFSGVPSRFSGSGSGTDFTLTISSLQPEDFATYYCFQGSQFPYTFGQGTKVEIK

SEQ ID NO: 204 - protein, 112 aa, Artificial Sequence
  source: /note="Description of Artificial Sequence: Synthetic polypeptide"
  source: /note="Light Chain of Pinatuzumab IgG histidine scanning variant #14"
DIQMTQSPSSLSASVGDRVTITCRSSQSIVHSVGNTHLEWYQQKPGKAPKLLIYKVSNRFSGVPSRFSGSGSGTDFTLTISSLQPEDFATYYCFQGSQFPYTFGQGTKVEIK

SEQ ID NO: 205 - protein, 112 aa, Artificial Sequence
  source: /note="Description of Artificial Sequence: Synthetic polypeptide"
  source: /note="Light Chain of Pinatuzumab IgG histidine scanning variant #15"
DIQMTQSPSSLSASVGDRVTITCRSSQSIVHSVGNTFHEWYQQKPGKAPKLLIYKVSNRFSGVPSRFSGSGSGTDFTLTISSLQPEDFATYYCFQGSQFPYTFGQGTKVEIK

SEQ ID NO: 206 - protein, 112 aa, Artificial Sequence
  source: /note="Description of Artificial Sequence: Synthetic polypeptide"
  source: /note="Light Chain of Pinatuzumab IgG histidine scanning variant #16"
DIQMTQSPSSLSASVGDRVTITCRSSQSIVHSVGNTFLHWYQQKPGKAPKLLIYKVSNRFSGVPSRFSGSGSGTDFTLTISSLQPEDFATYYCFQGSQFPYTFGQGTKVEIK

SEQ ID NO: 207 - protein, 112 aa, Artificial Sequence
  source: /note="Description of Artificial Sequence: Synthetic polypeptide"
  source: /note="Light Chain of Pinatuzumab IgG histidine scanning variant #17"
DIQMTQSPSSLSASVGDRVTITCRSSQSIVHSVGNTFLEWYQQKPGKAPKLLIYHVSNRFSGVPSRFSGSGSGTDFTLTISSLQPEDFATYYCFQGSQFPYTFGQGTKVEIK

SEQ ID NO: 208 - protein, 112 aa, Artificial Sequence
  source: /note="Description of Artificial Sequence: Synthetic polypeptide"
  source: /note="Light Chain of Pinatuzumab IgG histidine scanning variant #18"
DIQMTQSPSSLSASVGDRVTITCRSSQSIVHSVGNTFLEWYQQKPGKAPKLLIYKHSNRFSGVPSRFSGSGSGTDFTLTISSLQPEDFATYYCFQGSQFPYTFGQGTKVEIK

SEQ ID NO: 209 - protein, 112 aa, Artificial Sequence
  source: /note="Description of Artificial Sequence: Synthetic polypeptide"
  source: /note="Light Chain of Pinatuzumab IgG histidine scanning variant #19"
DIQMTQSPSSLSASVGDRVTITCRSSQSIVHSVGNTFLEWYQQKPGKAPKLLIYKVHNRFSGVPSRFSGSGSGTDFTLTISSLQPEDFATYYCFQGSQFPYTFGQGTKVEIK

SEQ ID NO: 210 - protein, 112 aa, Artificial Sequence
  source: /note="Description of Artificial Sequence: Synthetic polypeptide"
  source: /note="Light Chain of Pinatuzumab IgG histidine scanning variant #20"
DIQMTQSPSSLSASVGDRVTITCRSSQSIVHSVGNTFLEWYQQKPGKAPKLLIYKVSHRFSGVPSRFSGSGSGTDFTLTISSLQPEDFATYYCFQGSQFPYTFGQGTKVEIK

SEQ ID NO: 211 - protein, 112 aa, Artificial Sequence
  source: /note="Description of Artificial Sequence: Synthetic polypeptide"
  source: /note="Light Chain of Pinatuzumab IgG histidine scanning variant #21"
DIQMTQSPSSLSASVGDRVTITCRSSQSIVHSVGNTFLEWYQQKPGKAPKLLIYKVSNHFSGVPSRFSGSGSGTDFTLTISSLQPEDFATYYCFQGSQFPYTFGQGTKVEIK

SEQ ID NO: 212 - protein, 112 aa, Artificial Sequence
  source: /note="Description of Artificial Sequence: Synthetic polypeptide"
  source: /note="Light Chain of Pinatuzumab IgG histidine scanning variant #22"
DIQMTQSPSSLSASVGDRVTITCRSSQSIVHSVGNTFLEWYQQKPGKAPKLLIYKVSNRHSGVPSRFSGSGSGTDFTLTISSLQPEDFATYYCFQGSQFPYTFGQGTKVEIK

SEQ ID NO: 213 - protein, 112 aa, Artificial Sequence
  source: /note="Description of Artificial Sequence: Synthetic polypeptide"
  source: /note="Light Chain of Pinatuzumab IgG histidine scanning variant #23"
DIQMTQSPSSLSASVGDRVTITCRSSQSIVHSVGNTFLEWYQQKPGKAPKLLIYKVSNRFHGVPSRFSGSGSGTDFTLTISSLQPEDFATYYCFQGSQFPYTFGQGTKVEIK

SEQ ID NO: 214 - protein, 112 aa, Artificial Sequence
  source: /note="Description of Artificial Sequence: Synthetic polypeptide"
  source: /note="Light Chain of Pinatuzumab IgG histidine scanning variant #24"
DIQMTQSPSSLSASVGDRVTITCRSSQSIVHSVGNTFLEWYQQKPGKAPKLLIYKVSNRFSGVPSRFSGSGSGTDFTLTISSLQPEDFATYYCHQGSQFPYTFGQGTKVEIK

SEQ ID NO: 215 - protein, 112 aa, Artificial Sequence
  source: /note="Description of Artificial Sequence: Synthetic polypeptide"
  source: /note="Light Chain of Pinatuzumab IgG histidine scanning variant #25"
DIQMTQSPSSLSASVGDRVTITCRSSQSIVHSVGNTFLEWYQQKPGKAPKLLIYKVSNRFSGVPSRFSGSGSGTDFTLTISSLQPEDFATYYCFHGSQFPYTFGQGTKVEIK

SEQ ID NO: 216 - protein, 112 aa, Artificial Sequence
  source: /note="Description of Artificial Sequence: Synthetic polypeptide"
  source: /note="Light Chain of Pinatuzumab IgG histidine scanning variant #26"
DIQMTQSPSSLSASVGDRVTITCRSSQSIVHSVGNTFLEWYQQKPGKAPKLLIYKVSNRFSGVPSRFSGSGSGTDFTLTISSLQPEDFATYYCFQHSQFPYTFGQGTKVEIK

SEQ ID NO: 217 - protein, 112 aa, Artificial Sequence
  source: /note="Description of Artificial Sequence: Synthetic polypeptide"
  source: /note="Light Chain of Pinatuzumab IgG histidine scanning variant #27"
DIQMTQSPSSLSASVGDRVTITCRSSQSIVHSVGNTFLEWYQQKPGKAPKLLIYKVSNRFSGVPSRFSGSGSGTDFTLTISSLQPEDFATYYCFQGHQFPYTFGQGTKVEIK

SEQ ID NO: 218 - protein, 112 aa, Artificial Sequence
  source: /note="Description of Artificial Sequence: Synthetic polypeptide"
  source: /note="Light Chain of Pinatuzumab IgG histidine scanning variant #28"
DIQMTQSPSSLSASVGDRVTITCRSSQSIVHSVGNTFLEWYQQKPGKAPKLLIYKVSNRFSGVPSRFSGSGSGTDFTLTISSLQPEDFATYYCFQGSHFPYTFGQGTKVEIK

SEQ ID NO: 219 - protein, 112 aa, Artificial Sequence
  source: /note="Description of Artificial Sequence: Synthetic polypeptide"
  source: /note="Light Chain of Pinatuzumab IgG histidine scanning variant #29"
DIQMTQSPSSLSASVGDRVTITCRSSQSIVHSVGNTFLEWYQQKPGKAPKLLIYKVSNRFSGVPSRFSGSGSGTDFTLTISSLQPEDFATYYCFQGSQHPYTFGQGTKVEIK

SEQ ID NO: 220 - protein, 112 aa, Artificial Sequence
  source: /note="Description of Artificial Sequence: Synthetic polypeptide"
  source: /note="Light Chain of Pinatuzumab IgG histidine scanning variant #30"
DIQMTQSPSSLSASVGDRVTITCRSSQSIVHSVGNTFLEWYQQKPGKAPKLLIYKVSNRFSGVPSRFSGSGSGTDFTLTISSLQPEDFATYYCFQGSQFHYTFGQGTKVEIK

SEQ ID NO: 221 - protein, 112 aa, Artificial Sequence
  source: /note="Description of Artificial Sequence: Synthetic polypeptide"
  source: /note="Light Chain of Pinatuzumab IgG histidine scanning variant #31"
DIQMTQSPSSLSASVGDRVTITCRSSQSIVHSVGNTFLEWYQQKPGKAPKLLIYKVSNRFSGVPSRFSGSGSGTDFTLTISSLQPEDFATYYCFQGSQFPHTFGQGTKVEIK

SEQ ID NO: 222 - protein, 112 aa, Artificial Sequence
  source: /note="Description of Artificial Sequence: Synthetic polypeptide"
  source: /note="Light Chain of Pinatuzumab IgG histidine scanning variant #32"
DIQMTQSPSSLSASVGDRVTITCRSSQSIVHSVGNTFLEWYQQKPGKAPKLLIYKVSNRFSGVPSRFSGSGSGTDFTLTISSLQPEDFATYYCFQGSQFPYHFGQGTKVEIK

SEQ ID NO: 223 - protein, 120 aa, Artificial Sequence
  source: /note="Description of Artificial Sequence: Synthetic polypeptide"
  source: /note="Heavy Chain Combinations of Pinatuzumab IgG histidine scanning variant #1"
EVQLVESGGGLVQPGGSLRLSCAASGYEHSRSWHNWVRQAPGKGLEWVGRIYPGDGDTNYSGKFKGRFTISADTSKNTAYLQMNSLRAEDTAVYYCARDGSSWDWYFDVWGQGTLVTVSS

SEQ ID NO: 224 - protein, 120 aa, Artificial Sequence
  source: /note="Description of Artificial Sequence: Synthetic polypeptide"
  source: /note="Heavy Chain Combinations of Pinatuzumab IgG histidine scanning variant #2"
EVQLVESGGGLVQPGGSLRLSCAASGYEHSRSWMNWVRQAPGKGLEWVGRIYPGDGDTHYSGKFKGRFTISADTSKNTAYLQMNSLRAEDTAVYYCARDGSSWDWYFDVWGQGTLVTVSS

SEQ ID NO: 225 - protein, 120 aa, Artificial Sequence
  source: /note="Description of Artificial Sequence: Synthetic polypeptide"
  source: /note="Heavy Chain Combinations of Pinatuzumab IgG histidine scanning variant #3"
EVQLVESGGGLVQPGGSLRLSCAASGYEHSRSWMNWVRQAPGKGLEWVGRIYPGDGDTNYSGKHKGRFTISADTSKNTAYLQMNSLRAEDTAVYYCARDGSSWDWYFDVWGQGTLVTVSS

SEQ ID NO: 226 - protein, 120 aa, Artificial Sequence
  source: /note="Description of Artificial Sequence: Synthetic polypeptide"
  source: /note="Heavy Chain Combinations of Pinatuzumab IgG histidine scanning variant #4"
EVQLVESGGGLVQPGGSLRLSCAASGYEFSRSWHNWVRQAPGKGLEWVGRIYPGDGDTHYSGKFKGRFTISADTSKNTAYLQMNSLRAEDTAVYYCARDGSSWDWYFDVWGQGTLVTVSS

SEQ ID NO: 227 - protein, 120 aa, Artificial Sequence
  source: /note="Description of Artificial Sequence: Synthetic polypeptide"
  source: /note="Heavy Chain Combinations of Pinatuzumab IgG histidine scanning variant #5"
EVQLVESGGGLVQPGGSLRLSCAASGYEFSRSWHNWVRQAPGKGLEWVGRIYPGDGDTNYSGKHKGRFTISADTSKNTAYLQMNSLRAEDTAVYYCARDGSSWDWYFDVWGQGTLVTVSS

SEQ ID NO: 228 - protein, 120 aa, Artificial Sequence
  source: /note="Description of Artificial Sequence: Synthetic polypeptide"
  source: /note="Heavy Chain Combinations of Pinatuzumab IgG histidine scanning variant #6"
EVQLVESGGGLVQPGGSLRLSCAASGYEFSRSWMNWVRQAPGKGLEWVGRIYPGDGDTHYSGKHKGRFTISADTSKNTAYLQMNSLRAEDTAVYYCARDGSSWDWYFDVWGQGTLVTVSS

SEQ ID NO: 229 - protein, 120 aa, Artificial Sequence
  source: /note="Description of Artificial Sequence: Synthetic polypeptide"
  source: /note="Heavy Chain Combinations of Pinatuzumab IgG histidine scanning variant #7"
EVQLVESGGGLVQPGGSLRLSCAASGYEHSRSWHNWVRQAPGKGLEWVGRIYPGDGDTHYSGKFKGRFTISADTSKNTAYLQMNSLRAEDTAVYYCARDGSSWDWYFDVWGQGTLVTVSS

SEQ ID NO: 230 - protein, 120 aa, Artificial Sequence
  source: /note="Description of Artificial Sequence: Synthetic polypeptide"
  source: /note="Heavy Chain Combinations of Pinatuzumab IgG histidine scanning variant #8"
EVQLVESGGGLVQPGGSLRLSCAASGYEHSRSWHNWVRQAPGKGLEWVGRIYPGDGDTNYSGKHKGRFTISADTSKNTAYLQMNSLRAEDTAVYYCARDGSSWDWYFDVWGQGTLVTVSS

SEQ ID NO: 231 - protein, 120 aa, Artificial Sequence
  source: /note="Description of Artificial Sequence: Synthetic polypeptide"
  source: /note="Heavy Chain Combinations of Pinatuzumab IgG histidine scanning variant #9"
EVQLVESGGGLVQPGGSLRLSCAASGYEHSRSWMNWVRQAPGKGLEWVGRIYPGDGDTHYSGKHKGRFTISADTSKNTAYLQMNSLRAEDTAVYYCARDGSSWDWYFDVWGQGTLVTVSS

SEQ ID NO: 232 - protein, 120 aa, Artificial Sequence
  source: /note="Description of Artificial Sequence: Synthetic polypeptide"
  source: /note="Heavy Chain Combinations of Pinatuzumab IgG histidine scanning variant #10"
EVQLVESGGGLVQPGGSLRLSCAASGYEFSRSWHNWVRQAPGKGLEWVGRIYPGDGDTHYSGKHKGRFTISADTSKNTAYLQMNSLRAEDTAVYYCARDGSSWDWYFDVWGQGTLVTVSS

SEQ ID NO: 233 - protein, 120 aa, Artificial Sequence
  source: /note="Description of Artificial Sequence: Synthetic polypeptide"
  source: /note="Heavy Chain Combinations of Pinatuzumab IgG histidine scanning variant #11"
EVQLVESGGGLVQPGGSLRLSCAASGYEFSRSWMNWVRQAPGKGLEWVGRIYPGDGHTNYSGKFKGRFTISADTSKNTAYLQMNSLRAEDTAVYYCARDGHSWDWYFDVWGQGTLVTVSS

SEQ ID NO: 234 - protein, 120 aa, Artificial Sequence
  source: /note="Description of Artificial Sequence: Synthetic polypeptide"
  source: /note="Heavy Chain Combinations of Pinatuzumab IgG histidine scanning variant #12"
EVQLVESGGGLVQPGGSLRLSCAASGYEFSRSWMNWVRQAPGKGLEWVGRIYPGDGHTNYSGKFKGRFTISADTSKNTAYLQMNSLRAEDTAVYYCARDGSHWDWYFDVWGQGTLVTVSS

SEQ ID NO: 235 - protein, 120 aa, Artificial Sequence
  source: /note="Description of Artificial Sequence: Synthetic polypeptide"
  source: /note="Heavy Chain Combinations of Pinatuzumab IgG histidine scanning variant #13"
EVQLVESGGGLVQPGGSLRLSCAASGYEFSRSWMNWVRQAPGKGLEWVGRIYPGDGHTNYSGKFKGRFTISADTSKNTAYLQMNSLRAEDTAVYYCARDGSSWHWYFDVWGQGTLVTVSS

SEQ ID NO: 236 - protein, 120 aa, Artificial Sequence
  source: /note="Description of Artificial Sequence: Synthetic polypeptide"
  source: /note="Heavy Chain Combinations of Pinatuzumab IgG histidine scanning variant #14"
EVQLVESGGGLVQPGGSLRLSCAASGYEFSRSWMNWVRQAPGKGLEWVGRIYPGDGHTNYSGKFKGRFTISADTSKNTAYLQMNSLRAEDTAVYYCARDGSSWDWHFDVWGQGTLVTVSS

SEQ ID NO: 237 - protein, 120 aa, Artificial Sequence
  source: /note="Description of Artificial Sequence: Synthetic polypeptide"
  source: /note="Heavy Chain Combinations of Pinatuzumab IgG histidine scanning variant #15"
EVQLVESGGGLVQPGGSLRLSCAASGYEFSRSWMNWVRQAPGKGLEWVGRIYPGDGHTNYSGKFKGRFTISADTSKNTAYLQMNSLRAEDTAVYYCARDGSSWDWYHDVWGQGTLVTVSS

SEQ ID NO: 238 - protein, 120 aa, Artificial Sequence
  source: /note="Description of Artificial Sequence: Synthetic polypeptide"
  source: /note="Heavy Chain Combinations of Pinatuzumab IgG histidine scanning variant #16"
EVQLVESGGGLVQPGGSLRLSCAASGYEFSRSWMNWVRQAPGKGLEWVGRIYPGDGDTNYSGKFKGRFTISADTSKNTAYLQMNSLRAEDTAVYYCARDGHHWDWYFDVWGQGTLVTVSS

SEQ ID NO: 239 - protein, 120 aa, Artificial Sequence
  source: /note="Description of Artificial Sequence: Synthetic polypeptide"
  source: /note="Heavy Chain Combinations of Pinatuzumab IgG histidine scanning variant #17"
EVQLVESGGGLVQPGGSLRLSCAASGYEFSRSWMNWVRQAPGKGLEWVGRIYPGDGDTNYSGKFKGRFTISADTSKNTAYLQMNSLRAEDTAVYYCARDGHSWHWYFDVWGQGTLVTVSS

SEQ ID NO: 240 - protein, 120 aa, Artificial Sequence
  source: /note="Description of Artificial Sequence: Synthetic polypeptide"
  source: /note="Heavy Chain Combinations of Pinatuzumab IgG histidine scanning variant #18"
EVQLVESGGGLVQPGGSLRLSCAASGYEFSRSWMNWVRQAPGKGLEWVGRIYPGDGDTNYSGKFKGRFTISADTSKNTAYLQMNSLRAEDTAVYYCARDGHSWDWHFDVWGQGTLVTVSS

SEQ ID NO: 241 - protein, 120 aa, Artificial Sequence
  source: /note="Description of Artificial Sequence: Synthetic polypeptide"
  source: /note="Heavy Chain Combinations of Pinatuzumab IgG histidine scanning variant #19"
EVQLVESGGGLVQPGGSLRLSCAASGYEFSRSWMNWVRQAPGKGLEWVGRIYPGDGDTNYSGKFKGRFTISADTSKNTAYLQMNSLRAEDTAVYYCARDGHSWDWYHDVWGQGTLVTVSS

SEQ ID NO: 242 - protein, 120 aa, Artificial Sequence
  source: /note="Description of Artificial Sequence: Synthetic polypeptide"
  source: /note="Heavy Chain Combinations of Pinatuzumab IgG histidine scanning variant #20"
EVQLVESGGGLVQPGGSLRLSCAASGYEFSRSWMNWVRQAPGKGLEWVGRIYPGDGDTNYSGKFKGRFTISADTSKNTAYLQMNSLRAEDTAVYYCARDGSHWHWYFDVWGQGTLVTVSS

SEQ ID NO: 243 - protein, 120 aa, Artificial Sequence
  source: /note="Description of Artificial Sequence: Synthetic polypeptide"
  source: /note="Heavy Chain Combinations of Pinatuzumab IgG histidine scanning variant #21"
EVQLVESGGGLVQPGGSLRLSCAASGYEFSRSWMNWVRQAPGKGLEWVGRIYPGDGDTNYSGKFKGRFTISADTSKNTAYLQMNSLRAEDTAVYYCARDGSHWDWHFDVWGQGTLVTVSS

SEQ ID NO: 244 - protein, 120 aa, Artificial Sequence
  source: /note="Description of Artificial Sequence: Synthetic polypeptide"
  source: /note="Heavy Chain Combinations of Pinatuzumab IgG histidine scanning variant #22"
EVQLVESGGGLVQPGGSLRLSCAASGYEFSRSWMNWVRQAPGKGLEWVGRIYPGDGDTNYSGKFKGRFTISADTSKNTAYLQMNSLRAEDTAVYYCARDGSHWDWYHDVWGQGTLVTVSS

SEQ ID NO: 245 - protein, 120 aa, Artificial Sequence
  source: /note="Description of Artificial Sequence: Synthetic polypeptide"
  source: /note="Heavy Chain Combinations of Pinatuzumab IgG histidine scanning variant #23"
EVQLVESGGGLVQPGGSLRLSCAASGYEFSRSWMNWVRQAPGKGLEWVGRIYPGDGDTNYSGKFKGRFTISADTSKNTAYLQMNSLRAEDTAVYYCARDGSSWHWHFDVWGQGTLVTVSS

SEQ ID NO: 246 - protein, 120 aa, Artificial Sequence
  source: /note="Description of Artificial Sequence: Synthetic polypeptide"
  source: /note="Heavy Chain Combinations of Pinatuzumab IgG histidine scanning variant #24"
EVQLVESGGGLVQPGGSLRLSCAASGYEFSRSWMNWVRQAPGKGLEWVGRIYPGDGDTNYSGKFKGRFTISADTSKNTAYLQMNSLRAEDTAVYYCARDGSSWHWYHDVWGQGTLVTVSS

SEQ ID NO: 247 - protein, 120 aa, Artificial Sequence
  source: /note="Description of Artificial Sequence: Synthetic polypeptide"
  source: /note="Heavy Chain Combinations of Pinatuzumab IgG histidine scanning variant #25"
EVQLVESGGGLVQPGGSLRLSCAASGYEFSRSWMNWVRQAPGKGLEWVGRIYPGDGDTNYSGKFKGRFTISADTSKNTAYLQMNSLRAEDTAVYYCARDGSSWDWHHDVWGQGTLVTVSS

SEQ ID NO: 248 - protein, 120 aa, Artificial Sequence
  source: /note="Description of Artificial Sequence: Synthetic polypeptide"
  source: /note="Heavy Chain Combinations of Pinatuzumab IgG histidine scanning variant #26"
EVQLVESGGGLVQPGGSLRLSCAASGYEFSRSWMNWVRQAPGKGLEWVGRIYPGDGHTNYSGKFKGRFTISADTSKNTAYLQMNSLRAEDTAVYYCARDGHHWDWYFDVWGQGTLVTVSS

SEQ ID NO: 249 - protein, 120 aa, Artificial Sequence
  source: /note="Description of Artificial Sequence: Synthetic polypeptide"
  source: /note="Heavy Chain Combinations of Pinatuzumab IgG histidine scanning variant #27"
EVQLVESGGGLVQPGGSLRLSCAASGYEFSRSWMNWVRQAPGKGLEWVGRIYPGDGHTNYSGKFKGRFTISADTSKNTAYLQMNSLRAEDTAVYYCARDGHSWHWYFDVWGQGTLVTVSS

SEQ ID NO: 250 - protein, 120 aa, Artificial Sequence
  source: /note="Description of Artificial Sequence: Synthetic polypeptide"
  source: /note="Heavy Chain Combinations of Pinatuzumab IgG histidine scanning variant #28"
EVQLVESGGGLVQPGGSLRLSCAASGYEFSRSWMNWVRQAPGKGLEWVGRIYPGDGHTNYSGKFKGRFTISADTSKNTAYLQMNSLRAEDTAVYYCARDGHSWDWHFDVWGQGTLVTVSS

SEQ ID NO: 251 - protein, 120 aa, Artificial Sequence
  source: /note="Description of Artificial Sequence: Synthetic polypeptide"
  source: /note="Heavy Chain Combinations of Pinatuzumab IgG histidine scanning variant #29"
EVQLVESGGGLVQPGGSLRLSCAASGYEFSRSWMNWVRQAPGKGLEWVGRIYPGDGHTNYSGKFKGRFTISADTSKNTAYLQMNSLRAEDTAVYYCARDGHSWDWYHDVWGQGTLVTVSS

SEQ ID NO: 252 - protein, 120 aa, Artificial Sequence
  source: /note="Description of Artificial Sequence: Synthetic polypeptide"
  source: /note="Heavy Chain Combinations of Pinatuzumab IgG histidine scanning variant #30"
EVQLVESGGGLVQPGGSLRLSCAASGYEFSRSWMNWVRQAPGKGLEWVGRIYPGDGHTNYSGKFKGRFTISADTSKNTAYLQMNSLRAEDTAVYYCARDGSHWHWYFDVWGQGTLVTVSS

SEQ ID NO: 253 - protein, 120 aa, Artificial Sequence
  source: /note="Description of Artificial Sequence: Synthetic polypeptide"
  source: /note="Heavy Chain Combinations of Pinatuzumab IgG histidine scanning variant #31"
EVQLVESGGGLVQPGGSLRLSCAASGYEFSRSWMNWVRQAPGKGLEWVGRIYPGDGHTNYSGKFKGRFTISADTSKNTAYLQMNSLRAEDTAVYYCARDGSHWDWHFDVWGQGTLVTVSS

SEQ ID NO: 254 - protein, 120 aa, Artificial Sequence
  source: /note="Description of Artificial Sequence: Synthetic polypeptide"
  source: /note="Heavy Chain Combinations of Pinatuzumab IgG histidine scanning variant #32"
EVQLVESGGGLVQPGGSLRLSCAASGYEFSRSWMNWVRQAPGKGLEWVGRIYPGDGHTNYSGKFKGRFTISADTSKNTAYLQMNSLRAEDTAVYYCARDGSHWDWYHDVWGQGTLVTVSS

SEQ ID NO: 255 - protein, 120 aa, Artificial Sequence
  source: /note="Description of Artificial Sequence: Synthetic polypeptide"
  source: /note="Heavy Chain Combinations of Pinatuzumab IgG histidine scanning variant #33"
EVQLVESGGGLVQPGGSLRLSCAASGYEFSRSWMNWVRQAPGKGLEWVGRIYPGDGHTNYSGKFKGRFTISADTSKNTAYLQMNSLRAEDTAVYYCARDGSSWHWHFDVWGQGTLVTVSS

SEQ ID NO: 256 - protein, 120 aa, Artificial Sequence
  source: /note="Description of Artificial Sequence: Synthetic polypeptide"
  source: /note="Heavy Chain Combinations of Pinatuzumab IgG histidine scanning variant #34"
EVQLVESGGGLVQPGGSLRLSCAASGYEFSRSWMNWVRQAPGKGLEWVGRIYPGDGHTNYSGKFKGRFTISADTSKNTAYLQMNSLRAEDTAVYYCARDGSSWHWYHDVWGQGTLVTVSS

SEQ ID NO: 257 - protein, 120 aa, Artificial Sequence
  source: /note="Description of Artificial Sequence: Synthetic polypeptide"
  source: /note="Heavy Chain Combinations of Pinatuzumab IgG histidine scanning variant #35"
EVQLVESGGGLVQPGGSLRLSCAASGYEFSRSWMNWVRQAPGKGLEWVGRIYPGDGHTNYSGKFKGRFTISADTSKNTAYLQMNSLRAEDTAVYYCARDGSSWDWHHDVWGQGTLVTVSS

SEQ ID NO: 258 - protein, 120 aa, Artificial Sequence
  source: /note="Description of Artificial Sequence: Synthetic polypeptide"
  source: /note="Heavy Chain Combinations of Pinatuzumab IgG histidine scanning variant #36"
EVQLVESGGGLVQPGGSLRLSCAASGYEFSRSWMNWVRQAPGKGLEWVGRIYPGDGDTNYSGKFKGRFTISADTSKNTAYLQMNSLRAEDTAVYYCARDGHHWHWYFDVWGQGTLVTVSS

SEQ ID NO: 259 - protein, 120 aa, Artificial Sequence
  source: /note="Description of Artificial Sequence: Synthetic polypeptide"
  source: /note="Heavy Chain Combinations of Pinatuzumab IgG histidine scanning variant #37"
EVQLVESGGGLVQPGGSLRLSCAASGYEFSRSWMNWVRQAPGKGLEWVGRIYPGDGDTNYSGKFKGRFTISADTSKNTAYLQMNSLRAEDTAVYYCARDGHHWDWHFDVWGQGTLVTVSS

SEQ ID NO: 260 - protein, 120 aa, Artificial Sequence
  source: /note="Description of Artificial Sequence: Synthetic polypeptide"
  source: /note="Heavy Chain Combinations of Pinatuzumab IgG histidine scanning variant #38"
EVQLVESGGGLVQPGGSLRLSCAASGYEFSRSWMNWVRQAPGKGLEWVGRIYPGDGDTNYSGKFKGRFTISADTSKNTAYLQMNSLRAEDTAVYYCARDGHHWDWYHDVWGQGTLVTVSS

SEQ ID NO: 261 - protein, 120 aa, Artificial Sequence
  source: /note="Description of Artificial Sequence: Synthetic polypeptide"
  source: /note="Heavy Chain Combinations of Pinatuzumab IgG histidine scanning variant #39"
EVQLVESGGGLVQPGGSLRLSCAASGYEFSRSWMNWVRQAPGKGLEWVGRIYPGDGDTNYSGKFKGRFTISADTSKNTAYLQMNSLRAEDTAVYYCARDGHSWHWHFDVWGQGTLVTVSS

SEQ ID NO: 262 - protein, 120 aa, Artificial Sequence
  source: /note="Description of Artificial Sequence: Synthetic polypeptide"
  source: /note="Heavy Chain Combinations of Pinatuzumab IgG histidine scanning variant #40"
EVQLVESGGGLVQPGGSLRLSCAASGYEFSRSWMNWVRQAPGKGLEWVGRIYPGDGDTNYSGKFKGRFTISADTSKNTAYLQMNSLRAEDTAVYYCARDGHSWHWYHDVWGQGTLVTVSS

SEQ ID NO: 263 - protein, 120 aa, Artificial Sequence
  source: /note="Description of Artificial Sequence: Synthetic polypeptide"
  source: /note="Heavy Chain Combinations of Pinatuzumab IgG histidine scanning variant #41"
EVQLVESGGGLVQPGGSLRLSCAASGYEFSRSWMNWVRQAPGKGLEWVGRIYPGDGDTNYSGKFKGRFTISADTSKNTAYLQMNSLRAEDTAVYYCARDGHSWDWHHDVWGQGTLVTVSS

SEQ ID NO: 264 - protein, 120 aa, Artificial Sequence
  source: /note="Description of Artificial Sequence: Synthetic polypeptide"
  source: /note="Heavy Chain Combinations of Pinatuzumab IgG histidine scanning variant #42"
EVQLVESGGGLVQPGGSLRLSCAASGYEFSRSWMNWVRQAPGKGLEWVGRIYPGDGDTNYSGKFKGRFTISADTSKNTAYLQMNSLRAEDTAVYYCARDGSHWHWHFDVWGQGTLVTVSS

SEQ ID NO: 265 - protein, 120 aa, Artificial Sequence
  source: /note="Description of Artificial Sequence: Synthetic polypeptide"
  source: /note="Heavy Chain Combinations of Pinatuzumab IgG histidine scanning variant #43"
EVQLVESGGGLVQPGGSLRLSCAASGYEFSRSWMNWVRQAPGKGLEWVGRIYPGDGDTNYSGKFKGRFTISADTSKNTAYLQMNSLRAEDTAVYYCARDGSHWHWYHDVWGQGTLVTVSS

SEQ ID NO: 266 - protein, 120 aa, Artificial Sequence
  source: /note="Description of Artificial Sequence: Synthetic polypeptide"
  source: /note="Heavy Chain Combinations of Pinatuzumab IgG histidine scanning variant #44"
EVQLVESGGGLVQPGGSLRLSCAASGYEFSRSWMNWVRQAPGKGLEWVGRIYPGDGDTNYSGKFKGRFTISADTSKNTAYLQMNSLRAEDTAVYYCARDGSHWDWHHDVWGQGTLVTVSS

SEQ ID NO: 267 - protein, 120 aa, Artificial Sequence
  source: /note="Description of Artificial Sequence: Synthetic polypeptide"
  source: /note="Heavy Chain Combinations of Pinatuzumab IgG histidine scanning variant #45"
EVQLVESGGGLVQPGGSLRLSCAASGYEFSRSWMNWVRQAPGKGLEWVGRIYPGDGDTNYSGKFKGRFTISADTSKNTAYLQMNSLRAEDTAVYYCARDGSSWHWHHDVWGQGTLVTVSS

SEQ ID NO: 268 - protein, 123 aa, Artificial Sequence
  source: /note="Description of Artificial Sequence: Synthetic polypeptide"
  source: /note="Heavy Chain of TRPH-222 IgG"
EVQLVESGGGLVKPGGSLRLSCAASGFAFSIYDMSWVRQAPGKGLEWVAYISSGGGTTYYPDTVKGRFTISRDNAKNSLYLQMSSLRAEDTAMYYCARHSGYGSSYGVLFAYWGQGTLVTVSS

SEQ ID NO: 269 - protein, 107 aa, Artificial Sequence
  source: /note="Description of Artificial Sequence: Synthetic polypeptide"
  source: /note="Light Chain of TRPH-222 IgG"
DIQMTQSPSSLSASVGDRVTITCRASQDISNYLNWYQQKPGKAVKLLIYYTSILHSGVPSRFSGSGSGTDYTLTISSLQQEDFATYFCQQGNTLPWTFGGGTKVEIK

SEQ ID NO: 270 - protein, 10 aa, Artificial Sequence
  source: /note="Description of Artificial Sequence: Synthetic peptide"
  source: /note="Heavy Chain CDR1 of TRPH-222"
GFAFSIYDMS

SEQ ID NO: 271 - protein, 17 aa, Artificial Sequence
  source: /note="Description of Artificial Sequence: Synthetic peptide"
  source: /note="Heavy Chain CDR2 of TRPH-222"
YISSGGGTTYYPDTVKG

SEQ ID NO: 272 - protein, 12 aa, Artificial Sequence
  source: /note="Description of Artificial Sequence: Synthetic peptide"
  source: /note="Heavy Chain CDR3 of TRPH-222"
ARHSGYGSSYGV

SEQ ID NO: 273 - protein, 11 aa, Artificial Sequence
  source: /note="Description of Artificial Sequence: Synthetic peptide"
  source: /note="Light Chain CDR1 of TRPH-222"
RASQDISNYLN

SEQ ID NO: 274 - protein, 7 aa, Artificial Sequence
  source: /note="Description of Artificial Sequence: Synthetic peptide"
  source: /note="Light Chain CDR2 of TRPH-222"
YTSILHS

SEQ ID NO: 275 - protein, 9 aa, Artificial Sequence
  source: /note="Description of Artificial Sequence: Synthetic peptide"
  source: /note="Light Chain CDR3 of TRPH-222"
QQGNTLPWT

SEQ ID NO: 276 - protein, 123 aa, Artificial Sequence
  source: /note="Description of Artificial Sequence: Synthetic polypeptide"
  source: /note="Heavy Chain of TRPH-222 IgG histidine scanning variant #1"
EVQLVESGGGLVKPGGSLRLSCAASHFAFSIYDMSWVRQAPGKGLEWVAYISSGGGTTYYPDTVKGRFTISRDNAKNSLYLQMSSLRAEDTAMYYCARHSGYGSSYGVLFAYWGQGTLVTVSS

SEQ ID NO: 277 - protein, 123 aa, Artificial Sequence
  source: /note="Description of Artificial Sequence: Synthetic polypeptide"
  source: /note="Heavy Chain of TRPH-222 IgG histidine scanning variant #2"
EVQLVESGGGLVKPGGSLRLSCAASGHAFSIYDMSWVRQAPGKGLEWVAYISSGGGTTYYPDTVKGRFTISRDNAKNSLYLQMSSLRAEDTAMYYCARHSGYGSSYGVLFAYWGQGTLVTVSS

SEQ ID NO: 278 - protein, 123 aa, Artificial Sequence
  source: /note="Description of Artificial Sequence: Synthetic polypeptide"
  source: /note="Heavy Chain of TRPH-222 IgG histidine scanning variant #3"
EVQLVESGGGLVKPGGSLRLSCAASGFHFSIYDMSWVRQAPGKGLEWVAYISSGGGTTYYPDTVKGRFTISRDNAKNSLYLQMSSLRAEDTAMYYCARHSGYGSSYGVLFAYWGQGTLVTVSS

SEQ ID NO: 279 - protein, 123 aa, Artificial Sequence
  source: /note="Description of Artificial Sequence: Synthetic polypeptide"
  source: /note="Heavy Chain of TRPH-222 IgG histidine scanning variant #4"
EVQLVESGGGLVKPGGSLRLSCAASGFAHSIYDMSWVRQAPGKGLEWVAYISSGGGTTYYPDTVKGRFTISRDNAKNSLYLQMSSLRAEDTAMYYCARHSGYGSSYGVLFAYWGQGTLVTVSS

SEQ ID NO: 280 - protein, 123 aa, Artificial Sequence
  source: /note="Description of Artificial Sequence: Synthetic polypeptide"
  source: /note="Heavy Chain of TRPH-222 IgG histidine scanning variant #5"
EVQLVESGGGLVKPGGSLRLSCAASGFAFHIYDMSWVRQAPGKGLEWVAYISSGGGTTYYPDTVKGRFTISRDNAKNSLYLQMSSLRAEDTAMYYCARHSGYGSSYGVLFAYWGQGTLVTVSS

SEQ ID NO: 281 - protein, 123 aa, Artificial Sequence
  source: /note="Description of Artificial Sequence: Synthetic polypeptide"
  source: /note="Heavy Chain of TRPH-222 IgG histidine scanning variant #6"
EVQLVESGGGLVKPGGSLRLSCAASGFAFSHYDMSWVRQAPGKGLEWVAYISSGGGTTYYPDTVKGRFTISRDNAKNSLYLQMSSLRAEDTAMYYCARHSGYGSSYGVLFAYWGQGTLVTVSS

SEQ ID NO: 282 - protein, 123 aa, Artificial Sequence
  source: /note="Description of Artificial Sequence: Synthetic polypeptide"
  source: /note="Heavy Chain of TRPH-222 IgG histidine scanning variant #7"
EVQLVESGGGLVKPGGSLRLSCAASGFAFSIHDMSWVRQAPGKGLEWVAYISSGGGTTYYPDTVKGRFTISRDNAKNSLYLQMSSLRAEDTAMYYCARHSGYGSSYGVLFAYWGQGTLVTVSS

SEQ ID NO: 283 - protein, 123 aa, Artificial Sequence
  source: /note="Description of Artificial Sequence: Synthetic polypeptide"
  source: /note="Heavy Chain of TRPH-222 IgG histidine scanning variant #8"
EVQLVESGGGLVKPGGSLRLSCAASGFAFSIYHMSWVRQAPGKGLEWVAYISSGGGTTYYPDTVKGRFTISRDNAKNSLYLQMSSLRAEDTAMYYCARHSGYGSSYGVLFAYWGQGTLVTVSS

SEQ ID NO: 284 - protein, 123 aa, Artificial Sequence
  source: /note="Description of Artificial Sequence: Synthetic polypeptide"
  source: /note="Heavy Chain of TRPH-222 IgG histidine scanning variant #9"
EVQLVESGGGLVKPGGSLRLSCAASGFAFSIYDHSWVRQAPGKGLEWVAYISSGGGTTYYPDTVKGRFTISRDNAKNSLYLQMSSLRAEDTAMYYCARHSGYGSSYGVLFAYWGQGTLVTVSS

SEQ ID NO: 285 - protein, 123 aa, Artificial Sequence
  source: /note="Description of Artificial Sequence: Synthetic polypeptide"
  source: /note="Heavy Chain of TRPH-222 IgG histidine scanning variant #10"
EVQLVESGGGLVKPGGSLRLSCAASGFAFSIYDMHWVRQAPGKGLEWVAYISSGGGTTYYPDTVKGRFTISRDNAKNSLYLQMSSLRAEDTAMYYCARHSGYGSSYGVLFAYWGQGTLVTVSS

SEQ ID NO: 286 - protein, 123 aa, Artificial Sequence
  source: /note="Description of Artificial Sequence: Synthetic polypeptide"
  source: /note="Heavy Chain of TRPH-222 IgG histidine scanning variant #11"
EVQLVESGGGLVKPGGSLRLSCAASGFAFSIYDMSWVRQAPGKGLEWVAHISSGGGTTYYPDTVKGRFTISRDNAKNSLYLQMSSLRAEDTAMYYCARHSGYGSSYGVLFAYWGQGTLVTVSS

SEQ ID NO: 287 - protein, 123 aa, Artificial Sequence
  source: /note="Description of Artificial Sequence: Synthetic polypeptide"
  source: /note="Heavy Chain of TRPH-222 IgG histidine scanning variant #12"
EVQLVESGGGLVKPGGSLRLSCAASGFAFSIYDMSWVRQAPGKGLEWVAYHSSGGGTTYYPDTVKGRFTISRDNAKNSLYLQMSSLRAEDTAMYYCARHSGYGSSYGVLFAYWGQGTLVTVSS

SEQ ID NO: 288 - protein, 123 aa, Artificial Sequence
  source: /note="Description of Artificial Sequence: Synthetic polypeptide"
  source: /note="Heavy Chain of TRPH-222 IgG histidine scanning variant #13"
EVQLVESGGGLVKPGGSLRLSCAASGFAFSIYDMSWVRQAPGKGLEWVAYIHSGGGTTYYPDTVKGRFTISRDNAKNSLYLQMSSLRAEDTAMYYCARHSGYGSSYGVLFAYWGQGTLVTVSS

SEQ ID NO: 289 - protein, 123 aa, Artificial Sequence
  source: /note="Description of Artificial Sequence: Synthetic polypeptide"
  source: /note="Heavy Chain of TRPH-222 IgG histidine scanning variant #14"
EVQLVESGGGLVKPGGSLRLSCAASGFAFSIYDMSWVRQAPGKGLEWVAYISHGGGTTYYPDTVKGRFTISRDNAKNSLYLQMSSLRAEDTAMYYCARHSGYGSSYGVLFAYWGQGTLVTVSS

SEQ ID NO: 290 - protein, 123 aa, Artificial Sequence
  source: /note="Description of Artificial Sequence: Synthetic polypeptide"
  source: /note="Heavy Chain of TRPH-222 IgG histidine scanning variant #15"
EVQLVESGGGLVKPGGSLRLSCAASGFAFSIYDMSWVRQAPGKGLEWVAYISSHGGTTYYPDTVKGRFTISRDNAKNSLYLQMSSLRAEDTAMYYCARHSGYGSSYGVLFAYWGQGTLVTVSS

SEQ ID NO: 291 - protein, 123 aa, Artificial Sequence
  source: /note="Description of Artificial Sequence: Synthetic polypeptide"
  source: /note="Heavy Chain of TRPH-222 IgG histidine scanning variant #16"
EVQLVESGGGLVKPGGSLRLSCAASGFAFSIYDMSWVRQAPGKGLEWVAYISSGHGTTYYPDTVKGRFTISRDNAKNSLYLQMSSLRAEDTAMYYCARHSGYGSSYGVLFAYWGQGTLVTVSS

SEQ ID NO: 292 - protein, 123 aa, Artificial Sequence
  source: /note="Description of Artificial Sequence: Synthetic polypeptide"
  source: /note="Heavy Chain of TRPH-222 IgG histidine scanning variant #17"
EVQLVESGGGLVKPGGSLRLSCAASGFAFSIYDMSWVRQAPGKGLEWVAYISSGGHTTYYPDTVKGRFTISRDNAKNSLYLQMSSLRAEDTAMYYCARHSGYGSSYGVLFAYWGQGTLVTVSS

SEQ ID NO: 293 - protein, 123 aa, Artificial Sequence
  source: /note="Description of Artificial Sequence: Synthetic polypeptide"
  source: /note="Heavy Chain of TRPH-222 IgG histidine scanning variant #18"
EVQLVESGGGLVKPGGSLRLSCAASGFAFSIYDMSWVRQAPGKGLEWVAYISSGGGHTYYPDTVKGRFTISRDNAKNSLYLQMSSLRAEDTAMYYCARHSGYGSSYGVLFAYWGQGTLVTVSS

SEQ ID NO: 294 - protein, 123 aa, Artificial Sequence
  source: /note="Description of Artificial Sequence: Synthetic polypeptide"
  source: /note="Heavy Chain of TRPH-222 IgG histidine scanning variant #19"
EVQLVESGGGLVKPGGSLRLSCAASGFAFSIYDMSWVRQAPGKGLEWVAYISSGGGTHYYPDTVKGRFTISRDNAKNSLYLQMSSLRAEDTAMYYCARHSGYGSSYGVLFAYWGQGTLVTVSS

SEQ ID NO: 295 - protein, 123 aa, Artificial Sequence
  source: /note="Description of Artificial Sequence: Synthetic polypeptide"
  source: /note="Heavy Chain of TRPH-222 IgG histidine scanning variant #20"
EVQLVESGGGLVKPGGSLRLSCAASGFAFSIYDMSWVRQAPGKGLEWVAYISSGGGTTHYPDTVKGRFTISRDNAKNSLYLQMSSLRAEDTAMYYCARHSGYGSSYGVLFAYWGQGTLVTVSS

SEQ ID NO: 296 - protein, 123 aa, Artificial Sequence
  source: /note="Description of Artificial Sequence: Synthetic polypeptide"
  source: /note="Heavy Chain of TRPH-222 IgG histidine scanning variant #21"
EVQLVESGGGLVKPGGSLRLSCAASGFAFSIYDMSWVRQAPGKGLEWVAYISSGGGTTYHPDTVKGRFTISRDNAKNSLYLQMSSLRAEDTAMYYCARHSGYGSSYGVLFAYWGQGTLVTVSS

SEQ ID NO: 297 - protein, 123 aa, Artificial Sequence
  source: /note="Description of Artificial Sequence: Synthetic polypeptide"
  source: /note="Heavy Chain of TRPH-222 IgG histidine scanning variant #22"
EVQLVESGGGLVKPGGSLRLSCAASGFAFSIYDMSWVRQAPGKGLEWVAYISSGGGTTYYHDTVKGRFTISRDNAKNSLYLQMSSLRAEDTAMYYCARHSGYGSSYGVLFAYWGQGTLVTVSS

SEQ ID NO: 298 - protein, 123 aa, Artificial Sequence
  source: /note="Description of Artificial Sequence: Synthetic polypeptide"
  source: /note="Heavy Chain of TRPH-222 IgG histidine scanning variant #23"
EVQLVESGGGLVKPGGSLRLSCAASGFAFSIYDMSWVRQAPGKGLEWVAYISSGGGTTYYPHTVKGRFTISRDNAKNSLYLQMSSLRAEDTAMYYCARHSGYGSSYGVLFAYWGQGTLVTVSS

SEQ ID NO: 299 - protein, 123 aa, Artificial Sequence
  source: /note="Description of Artificial Sequence: Synthetic polypeptide"
  source: /note="Heavy Chain of TRPH-222 IgG histidine scanning variant #24"
EVQLVESGGGLVKPGGSLRLSCAASGFAFSIYDMSWVRQAPGKGLEWVAYISSGGGTTYYPDHVKGRFTISRDNAKNSLYLQMSSLRAEDTAMYYCARHSGYGSSYGVLFAYWGQGTLVTVSS

SEQ ID NO: 300 - protein, 123 aa, Artificial Sequence
  source: /note="Description of Artificial Sequence: Synthetic polypeptide"
  source: /note="Heavy Chain of TRPH-222 IgG histidine scanning variant #25"
EVQLVESGGGLVKPGGSLRLSCAASGFAFSIYDMSWVRQAPGKGLEWVAYISSGGGTTYYPDTHKGRFTISRDNAKNSLYLQMSSLRAEDTAMYYCARHSGYGSSYGVLFAYWGQGTLVTVSS

SEQ ID NO: 301 - protein, 123 aa, Artificial Sequence
  source: /note="Description of Artificial Sequence: Synthetic polypeptide"
  source: /note="Heavy Chain of TRPH-222 IgG histidine scanning variant #26"
EVQLVESGGGLVKPGGSLRLSCAASGFAFSIYDMSWVRQAPGKGLEWVAYISSGGGTTYYPDTVHGRFTISRDNAKNSLYLQMSSLRAEDTAMYYCARHSGYGSSYGVLFAYWGQGTLVTVSS

SEQ ID NO: 302 - protein, 123 aa, Artificial Sequence
  source: /note="Description of Artificial Sequence: Synthetic polypeptide"
  source: /note="Heavy Chain of TRPH-222 IgG histidine scanning variant #27"
EVQLVESGGGLVKPGGSLRLSCAASGFAFSIYDMSWVRQAPGKGLEWVAYISSGGGTTYYPDTVKHRFTISRDNAKNSLYLQMSSLRAEDTAMYYCARHSGYGSSYGVLFAYWGQGTLVTVSS

SEQ ID NO: 303 - protein, 123 aa, Artificial Sequence
  source: /note="Description of Artificial Sequence: Synthetic polypeptide"
  source: /note="Heavy Chain of TRPH-222 IgG histidine scanning variant #28"
EVQLVESGGGLVKPGGSLRLSCAASGFAFSIYDMSWVRQAPGKGLEWVAYISSGGGTTYYPDTVKGRFTISRDNAKNSLYLQMSSLRAEDTAMYYCHRHSGYGSSYGVLFAYWGQGTLVTVSS

SEQ ID NO: 304 - protein, 123 aa, Artificial Sequence
  source: /note="Description of Artificial Sequence: Synthetic polypeptide"
  source: /note="Heavy Chain of TRPH-222 IgG histidine scanning variant #29"
EVQLVESGGGLVKPGGSLRLSCAASGFAFSIYDMSWVRQAPGKGLEWVAYISSGGGTTYYPDTVKGRFTISRDNAKNSLYLQMSSLRAEDTAMYYCAHHSGYGSSYGVLFAYWGQGTLVTVSS

SEQ ID NO: 305 - protein, 123 aa, Artificial Sequence
  source: /note="Description of Artificial Sequence: Synthetic polypeptide"
  source: /note="Heavy Chain of TRPH-222 IgG histidine scanning variant #30"
EVQLVESGGGLVKPGGSLRLSCAASGFAFSIYDMSWVRQAPGKGLEWVAYISSGGGTTYYPDTVKGRFTISRDNAKNSLYLQMSSLRAEDTAMYYCARASGYGSSYGVLFAYWGQGTLVTVSS

SEQ ID NO: 306 - protein, 123 aa, Artificial Sequence
  source: /note="Description of Artificial Sequence: Synthetic polypeptide"
  source: /note="Heavy Chain of TRPH-222 IgG histidine scanning variant #31"
EVQLVESGGGLVKPGGSLRLSCAASGFAFSIYDMSWVRQAPGKGLEWVAYISSGGGTTYYPDTVKGRFTISRDNAKNSLYLQMSSLRAEDTAMYYCARHHGYGSSYGVLFAYWGQGTLVTVSS

SEQ ID NO: 307 - protein, 123 aa, Artificial Sequence
  source: /note="Description of Artificial Sequence: Synthetic polypeptide"
  source: /note="Heavy Chain of TRPH-222 IgG histidine scanning variant #32"
EVQLVESGGGLVKPGGSLRLSCAASGFAFSIYDMSWVRQAPGKGLEWVAYISSGGGTTYYPDTVKGRFTISRDNAKNSLYLQMSSLRAEDTAMYYCARHSHYGSSYGVLFAYWGQGTLVTVSS

SEQ ID NO: 308 - protein, 123 aa, Artificial Sequence
  source: /note="Description of Artificial Sequence: Synthetic polypeptide"
  source: /note="Heavy Chain of TRPH-222 IgG histidine scanning variant #33"
EVQLVESGGGLVKPGGSLRLSCAASGFAFSIYDMSWVRQAPGKGLEWVAYISSGGGTTYYPDTVKGRFTISRDNAKNSLYLQMSSLRAEDTAMYYCARHSGHGSSYGVLFAYWGQGTLVTVSS

SEQ ID NO: 309 - protein, 123 aa, Artificial Sequence
  source: /note="Description of Artificial Sequence: Synthetic polypeptide"
  source: /note="Heavy Chain of TRPH-222 IgG histidine scanning variant #34"
EVQLVESGGGLVKPGGSLRLSCAASGFAFSIYDMSWVRQAPGKGLEWVAYISSGGGTTYYPDTVKGRFTISRDNAKNSLYLQMSSLRAEDTAMYYCARHSGYHSSYGVLFAYWGQGTLVTVSS

SEQ ID NO: 310 - protein, 123 aa, Artificial Sequence
  source: /note="Description of Artificial Sequence: Synthetic polypeptide"
  source: /note="Heavy Chain of TRPH-222 IgG histidine scanning variant #35"
EVQLVESGGGLVKPGGSLRLSCAASGFAFSIYDMSWVRQAPGKGLEWVAYISSGGGTTYYPDTVKGRFTISRDNAKNSLYLQMSSLRAEDTAMYYCARHSGYGHSYGVLFAYWGQGTLVTVSS

SEQ ID NO: 311 - protein, 123 aa, Artificial Sequence
  source: /note="Description of Artificial Sequence: Synthetic polypeptide"
  source: /note="Heavy Chain of TRPH-222 IgG histidine scanning variant #36"
EVQLVESGGGLVKPGGSLRLSCAASGFAFSIYDMSWVRQAPGKGLEWVAYISSGGGTTYYPDTVKGRFTISRDNAKNSLYLQMSSLRAEDTAMYYCARHSGYGSHYGVLFAYWGQGTLVTVSS

SEQ ID NO: 312 - protein, 123 aa, Artificial Sequence
  source: /note="Description of Artificial Sequence: Synthetic polypeptide"
  source: /note="Heavy Chain of TRPH-222 IgG histidine scanning variant #37"
EVQLVESGGGLVKPGGSLRLSCAASGFAFSIYDMSWVRQAPGKGLEWVAYISSGGGTTYYPDTVKGRFTISRDNAKNSLYLQMSSLRAEDTAMYYCARHSGYGSSHGVLFAYWGQGTLVTVSS

SEQ ID NO: 313 - protein, 123 aa, Artificial Sequence
  source: /note="Description of Artificial Sequence: Synthetic polypeptide"
  source: /note="Heavy Chain of TRPH-222 IgG histidine scanning variant #38"
EVQLVESGGGLVKPGGSLRLSCAASGFAFSIYDMSWVRQAPGKGLEWVAYISSGGGTTYYPDTVKGRFTISRDNAKNSLYLQMSSLRAEDTAMYYCARHSGYGSSYHVLFAYWGQGTLVTVSS

SEQ ID NO: 314 - protein, 123 aa, Artificial Sequence
  source: /note="Description of Artificial Sequence: Synthetic polypeptide"
  source: /note="Heavy Chain of TRPH-222 IgG histidine scanning variant #39"
EVQLVESGGGLVKPGGSLRLSCAASGFAFSIYDMSWVRQAPGKGLEWVAYISSGGGTTYYPDTVKGRFTISRDNAKNSLYLQMSSLRAEDTAMYYCARHSGYGSSYGHLFAYWGQGTLVTVSS

SEQ ID NO: 315 - protein, 123 aa, Artificial Sequence
  source: /note="Description of Artificial Sequence: Synthetic polypeptide"
  source: /note="Heavy Chain of TRPH-222 IgG histidine scanning variant #40"
EVQLVESGGGLVKPGGSLRLSCAASGFAFSIYDMSWVRQAPGKGLEWVAYISSGGGTTYYPDTVKGRFTISRDNAKNSLYLQMSSLRAEDTAMYYCARHSGYGSSYGVHFAYWGQGTLVTVSS

SEQ ID NO: 316 - protein, 123 aa, Artificial Sequence
  source: /note="Description of Artificial Sequence: Synthetic polypeptide"
  source: /note="Heavy Chain of TRPH-222 IgG histidine scanning variant #41"
EVQLVESGGGLVKPGGSLRLSCAASGFAFSIYDMSWVRQAPGKGLEWVAYISSGGGTTYYPDTVKGRFTISRDNAKNSLYLQMSSLRAEDTAMYYCARHSGYGSSYGVLHAYWGQGTLVTVSS

SEQ ID NO: 317 - protein, 123 aa, Artificial Sequence
  source: /note="Description of Artificial Sequence: Synthetic polypeptide"
  source: /note="Heavy Chain of TRPH-222 IgG histidine scanning variant #42"
EVQLVESGGGLVKPGGSLRLSCAASGFAFSIYDMSWVRQAPGKGLEWVAYISSGGGTTYYPDTVKGRFTISRDNAKNSLYLQMSSLRAEDTAMYYCARHSGYGSSYGVLFHYWGQGTLVTVSS

SEQ ID NO: 318 - protein, 123 aa, Artificial Sequence
  source: /note="Description of Artificial Sequence: Synthetic polypeptide"
  source: /note="Heavy Chain of TRPH-222 IgG histidine scanning variant #43"
EVQLVESGGGLVKPGGSLRLSCAASGFAFSIYDMSWVRQAPGKGLEWVAYISSGGGTTYYPDTVKGRFTISRDNAKNSLYLQMSSLRAEDTAMYYCARHSGYGSSYGVLFAHWGQGTLVTVSS

SEQ ID NO: 319 - protein, 107 aa, Artificial Sequence
  source: /note="Description of Artificial Sequence: Synthetic polypeptide"
  source: /note="Light Chain of TRPH-222 IgG histidine scanning variant #1"
DIQMTQSPSSLSASVGDRVTITCHASQDISNYLNWYQQKPGKAVKLLIYYTSILHSGVPSRFSGSGSGTDYTLTISSLQQEDFATYFCQQGNTLPWTFGGGTKVEIK

SEQ ID NO: 320 - protein, 107 aa, Artificial Sequence
  source: /note="Description of Artificial Sequence: Synthetic polypeptide"
  source: /note="Light Chain of TRPH-222 IgG histidine scanning variant #2"
DIQMTQSPSSLSASVGDRVTITCRHSQDISNYLNWYQQKPGKAVKLLIYYTSILHSGVPSRFSGSGSGTDYTLTISSLQQEDFATYFCQQGNTLPWTFGGGTKVEIK

SEQ ID NO: 321 - protein, 107 aa, Artificial Sequence
  source: /note="Description of Artificial Sequence: Synthetic polypeptide"
  source: /note="Light Chain of TRPH-222 IgG histidine scanning variant #3"
DIQMTQSPSSLSASVGDRVTITCRAHQDISNYLNWYQQKPGKAVKLLIYYTSILHSGVPSRFSGSGSGTDYTLTISSLQQEDFATYFCQQGNTLPWTFGGGTKVEIK

SEQ ID NO: 322 - protein, 107 aa, Artificial Sequence
  source: /note="Description of Artificial Sequence: Synthetic polypeptide"
  source: /note="Light Chain of TRPH-222 IgG histidine scanning variant #4"
DIQMTQSPSSLSASVGDRVTITCRASHDISNYLNWYQQKPGKAVKLLIYYTSILHSGVPSRFSGSGSGTDYTLTISSLQQEDFATYFCQQGNTLPWTFGGGTKVEIK

SEQ ID NO: 323 - protein, 107 aa, Artificial Sequence
  source: /note="Description of Artificial Sequence: Synthetic polypeptide"
  source: /note="Light Chain of TRPH-222 IgG histidine scanning variant #5"
DIQMTQSPSSLSASVGDRVTITCRASQHISNYLNWYQQKPGKAVKLLIYYTSILHSGVPSRFSGSGSGTDYTLTISSLQQEDFATYFCQQGNTLPWTFGGGTKVEIK

SEQ ID NO: 324 - protein, 107 aa, Artificial Sequence
  source: /note="Description of Artificial Sequence: Synthetic polypeptide"
  source: /note="Light Chain of TRPH-222 IgG histidine scanning variant #6"
DIQMTQSPSSLSASVGDRVTITCRASQDHSNYLNWYQQKPGKAVKLLIYYTSILHSGVPSRFSGSGSGTDYTLTISSLQQEDFATYFCQQGNTLPWTFGGGTKVEIK

SEQ ID NO: 325 - protein, 107 aa, Artificial Sequence
  source: /note="Description of Artificial Sequence: Synthetic polypeptide"
  source: /note="Light Chain of TRPH-222 IgG histidine scanning variant #7"
DIQMTQSPSSLSASVGDRVTITCRASQDIHNYLNWYQQKPGKAVKLLIYYTSILHSGVPSRFSGSGSGTDYTLTISSLQQEDFATYFCQQGNTLPWTFGGGTKVEIK

SEQ ID NO: 326 - protein, 107 aa, Artificial Sequence
  source: /note="Description of Artificial Sequence: Synthetic polypeptide"
  source: /note="Light Chain of TRPH-222 IgG histidine scanning variant #8"
DIQMTQSPSSLSASVGDRVTITCRASQDISHYLNWYQQKPGKAVKLLIYYTSILHSGVPSRFSGSGSGTDYTLTISSLQQEDFATYFCQQGNTLPWTFGGGTKVEIK

SEQ ID NO: 327 - protein, 107 aa, Artificial Sequence
  source: /note="Description of Artificial Sequence: Synthetic polypeptide"
  source: /note="Light Chain of TRPH-222 IgG histidine scanning variant #9"
DIQMTQSPSSLSASVGDRVTITCRASQDISNHLNWYQQKPGKAVKLLIYYTSILHSGVPSRFSGSGSGTDYTLTISSLQQEDFATYFCQQGNTLPWTFGGGTKVEIK

SEQ ID NO: 328 - protein, 107 aa, Artificial Sequence
  source: /note="Description of Artificial Sequence: Synthetic polypeptide"
  source: /note="Light Chain of TRPH-222 IgG histidine scanning variant #10"
DIQMTQSPSSLSASVGDRVTITCRASQDISNYHNWYQQKPGKAVKLLIYYTSILHSGVPSRFSGSGSGTDYTLTISSLQQEDFATYFCQQGNTLPWTFGGGTKVEIK

SEQ ID NO: 329 - protein, 107 aa, Artificial Sequence
  source: /note="Description of Artificial Sequence: Synthetic polypeptide"
  source: /note="Light Chain of TRPH-222 IgG histidine scanning variant #11"
DIQMTQSPSSLSASVGDRVTITCRASQDISNYLHWYQQKPGKAVKLLIYYTSILHSGVPSRFSGSGSGTDYTLTISSLQQEDFATYFCQQGNTLPWTFGGGTKVEIK

SEQ ID NO: 330 - protein, 107 aa, Artificial Sequence
  source: /note="Description of Artificial Sequence: Synthetic polypeptide"
  source: /note="Light Chain of TRPH-222 IgG histidine scanning variant #12"
DIQMTQSPSSLSASVGDRVTITCRASQDISNYLNWYQQKPGKAVKLLIYHTSILHSGVPSRFSGSGSGTDYTLTISSLQQEDFATYFCQQGNTLPWTFGGGTKVEIK

SEQ ID NO: 331 - protein, 107 aa, Artificial Sequence
  source: /note="Description of Artificial Sequence: Synthetic polypeptide"
  source: /note="Light Chain of TRPH-222 IgG histidine scanning variant #13"
DIQMTQSPSSLSASVGDRVTITCRASQDISNYLNWYQQKPGKAVKLLIYYHSILHSGVPSRFSGSGSGTDYTLTISSLQQEDFATYFCQQGNTLPWTFGGGTKVEIK

SEQ ID NO: 332 - protein, 107 aa, Artificial Sequence
  source: /note="Description of Artificial Sequence: Synthetic polypeptide"
  source: /note="Light Chain of TRPH-222 IgG histidine scanning variant #14"
DIQMTQSPSSLSASVGDRVTITCRASQDISNYLNWYQQKPGKAVKLLIYYTHILHSGVPSRFSGSGSGTDYTLTISSLQQEDFATYFCQQGNTLPWTFGGGTKVEIK

SEQ ID NO: 333 - protein, 107 aa, Artificial Sequence
  source: /note="Description of Artificial Sequence: Synthetic polypeptide"
  source: /note="Light Chain of TRPH-222 IgG histidine scanning variant #15"
DIQMTQSPSSLSASVGDRVTITCRASQDISNYLNWYQQKPGKAVKLLIYYTSHLHSGVPSRFSGSGSGTDYTLTISSLQQEDFATYFCQQGNTLPWTFGGGTKVEIK

SEQ ID NO: 334 - protein, 107 aa, Artificial Sequence
  source: /note="Description of Artificial Sequence: Synthetic polypeptide"
  source: /note="Light Chain of TRPH-222 IgG histidine scanning variant #16"
DIQMTQSPSSLSASVGDRVTITCRASQDISNYLNWYQQKPGKAVKLLIYYTSIHHSGVPSRFSGSGSGTDYTLTISSLQQEDFATYFCQQGNTLPWTFGGGTKVEIK

SEQ ID NO: 335 - protein, 107 aa, Artificial Sequence
  source: /note="Description of Artificial Sequence: Synthetic polypeptide"
  source: /note="Light Chain of TRPH-222 IgG histidine scanning variant #17"
DIQMTQSPSSLSASVGDRVTITCRASQDISNYLNWYQQKPGKAVKLLIYYTSILASGVPSRFSGSGSGTDYTLTISSLQQEDFATYFCQQGNTLPWTFGGGTKVEIK

SEQ ID NO: 336 - protein, 107 aa, Artificial Sequence
  source: /note="Description of Artificial Sequence: Synthetic polypeptide"
  source: /note="Light Chain of TRPH-222 IgG histidine scanning variant #18"
DIQMTQSPSSLSASVGDRVTITCRASQDISNYLNWYQQKPGKAVKLLIYYTSILHHGVPSRFSGSGSGTDYTLTISSLQQEDFATYFCQQGNTLPWTFGGGTKVEIK

SEQ ID NO: 337 - protein, 107 aa, Artificial Sequence
  source: /note="Description of Artificial Sequence: Synthetic polypeptide"
  source: /note="Light Chain of TRPH-222 IgG histidine scanning variant #19"
DIQMTQSPSSLSASVGDRVTITCRASQDISNYLNWYQQKPGKAVKLLIYYTSILHSGVPSRFSGSGSGTDYTLTISSLQQEDFATYFCHQGNTLPWTFGGGTKVEIK

SEQ ID NO: 338 - protein, 107 aa, Artificial Sequence
  source: /note="Description of Artificial Sequence: Synthetic polypeptide"
  source: /note="Light Chain of TRPH-222 IgG histidine scanning variant #20"
DIQMTQSPSSLSASVGDRVTITCRASQDISNYLNWYQQKPGKAVKLLIYYTSILHSGVPSRFSGSGSGTDYTLTISSLQQEDFATYFCQHGNTLPWTFGGGTKVEIK

SEQ ID NO: 339 - protein, 107 aa, Artificial Sequence
  source: /note="Description of Artificial Sequence: Synthetic polypeptide"
  source: /note="Light Chain of TRPH-222 IgG histidine scanning variant #21"
DIQMTQSPSSLSASVGDRVTITCRASQDISNYLNWYQQKPGKAVKLLIYYTSILHSGVPSRFSGSGSGTDYTLTISSLQQEDFATYFCQQHNTLPWTFGGGTKVEIK

SEQ ID NO: 340 - protein, 107 aa, Artificial Sequence
  source: /note="Description of Artificial Sequence: Synthetic polypeptide"
  source: /note="Light Chain of TRPH-222 IgG histidine scanning variant #22"
DIQMTQSPSSLSASVGDRVTITCRASQDISNYLNWYQQKPGKAVKLLIYYTSILHSGVPSRFSGSGSGTDYTLTISSLQQEDFATYFCQQGHTLPWTFGGGTKVEIK

SEQ ID NO: 341 - protein, 107 aa, Artificial Sequence
  source: /note="Description of Artificial Sequence: Synthetic polypeptide"
  source: /note="Light Chain of TRPH-222 IgG histidine scanning variant #23"
DIQMTQSPSSLSASVGDRVTITCRASQDISNYLNWYQQKPGKAVKLLIYYTSILHSGVPSRFSGSGSGTDYTLTISSLQQEDFATYFCQQGNHLPWTFGGGTKVEIK

SEQ ID NO: 342 - protein, 107 aa, Artificial Sequence
  source: /note="Description of Artificial Sequence: Synthetic polypeptide"
  source: /note="Light Chain of TRPH-222 IgG histidine scanning variant #24"
DIQMTQSPSSLSASVGDRVTITCRASQDISNYLNWYQQKPGKAVKLLIYYTSILHSGVPSRFSGSGSGTDYTLTISSLQQEDFATYFCQQGNTHPWTFGGGTKVEIK

SEQ ID NO: 343 - protein, 107 aa, Artificial Sequence
  source: /note="Description of Artificial Sequence: Synthetic polypeptide"
  source: /note="Light Chain of TRPH-222 IgG histidine scanning variant #25"
DIQMTQSPSSLSASVGDRVTITCRASQDISNYLNWYQQKPGKAVKLLIYYTSILHSGVPSRFSGSGSGTDYTLTISSLQQEDFATYFCQQGNTLHWTFGGGTKVEIK

SEQ ID NO: 344 - protein, 107 aa, Artificial Sequence
  source: /note="Description of Artificial Sequence: Synthetic polypeptide"
  source: /note="Light Chain of TRPH-222 IgG histidine scanning variant #26"
DIQMTQSPSSLSASVGDRVTITCRASQDISNYLNWYQQKPGKAVKLLIYYTSILHSGVPSRFSGSGSGTDYTLTISSLQQEDFATYFCQQGNTLPHTFGGGTKVEIK

SEQ ID NO: 345 - protein, 107 aa, Artificial Sequence
  source: /note="Description of Artificial Sequence: Synthetic polypeptide"
  source: /note="Light Chain of TRPH-222 IgG histidine scanning variant #27"
DIQMTQSPSSLSASVGDRVTITCRASQDISNYLNWYQQKPGKAVKLLIYYTSILHSGVPSRFSGSGSGTDYTLTISSLQQEDFATYFCQQGNTLPWHFGGGTKVEIK

SEQ ID NO: 346 - protein, 123 aa, Artificial Sequence
  source: /note="Description of Artificial Sequence: Synthetic polypeptide"
  source: /note="Heavy Chain Combinations of TRPH-222 IgG histidine scanning variant #1"
EVQLVESGGGLVKPGGSLRLSCAASGFAFSIHDMSWVRQAPGKGLEWVAYISHGGGTTYYPDTVKGRFTISRDNAKNSLYLQMSSLRAEDTAMYYCARHSGYGSSYGVLFAYWGQGTLVTVSS

SEQ ID NO: 347 - protein, 123 aa, Artificial Sequence
  source: /note="Description of Artificial Sequence: Synthetic polypeptide"
  source: /note="Heavy Chain Combinations of TRPH-222 IgG histidine scanning variant #2"
EVQLVESGGGLVKPGGSLRLSCAASGFAFSIHDMSWVRQAPGKGLEWVAYISSGGGTTYYPDTVKGRFTISRDNAKNSLYLQMSSLRAEDTAMYYCHRHSGYGSSYGVLFAYWGQGTLVTVSS

SEQ ID NO: 348 - protein, 123 aa, Artificial Sequence
  source: /note="Description of Artificial Sequence: Synthetic polypeptide"
  source: /note="Heavy Chain Combinations of TRPH-222 IgG histidine scanning variant #3"
EVQLVESGGGLVKPGGSLRLSCAASGFAFSIHDMSWVRQAPGKGLEWVAYISSGGGTTYYPDTVKGRFTISRDNAKNSLYLQMSSLRAEDTAMYYCARHHGYGSSYGVLFAYWGQGTLVTVSS

SEQ ID NO: 349 - protein, 123 aa, Artificial Sequence
  source: /note="Description of Artificial Sequence: Synthetic polypeptide"
  source: /note="Heavy Chain Combinations of TRPH-222 IgG histidine scanning variant #4"
EVQLVESGGGLVKPGGSLRLSCAASGFAFSIHDMSWVRQAPGKGLEWVAYISSGGGTTYYPDTVKGRFTISRDNAKNSLYLQMSSLRAEDTAMYYCARHSGYGSSYGVLFHYWGQGTLVTVSS

SEQ ID NO: 350 - protein, 123 aa, Artificial Sequence
  source: /note="Description of Artificial Sequence: Synthetic polypeptide"
  source: /note="Heavy Chain Combinations of TRPH-222 IgG histidine scanning variant #5"
EVQLVESGGGLVKPGGSLRLSCAASGFAFSIYDMSWVRQAPGKGLEWVAYISHGGGTTYYPDTVKGRFTISRDNAKNSLYLQMSSLRAEDTAMYYCHRHSGYGSSYGVLFAYWGQGTLVTVSS

SEQ ID NO: 351 - protein, 123 aa, Artificial Sequence
  source: /note="Description of Artificial Sequence: Synthetic polypeptide"
  source: /note="Heavy Chain Combinations of TRPH-222 IgG histidine scanning variant #6"
EVQLVESGGGLVKPGGSLRLSCAASGFAFSIYDMSWVRQAPGKGLEWVAYISHGGGTTYYPDTVKGRFTISRDNAKNSLYLQMSSLRAEDTAMYYCARHHGYGSSYGVLFAYWGQGTLVTVSS

SEQ ID NO: 352 - protein, 123 aa, Artificial Sequence
  source: /note="Description of Artificial Sequence: Synthetic polypeptide"
  source: /note="Heavy Chain Combinations of TRPH-222 IgG histidine scanning variant #7"
EVQLVESGGGLVKPGGSLRLSCAASGFAFSIYDMSWVRQAPGKGLEWVAYISHGGGTTYYPDTVKGRFTISRDNAKNSLYLQMSSLRAEDTAMYYCARHSGYGSSYGVLFHYWGQGTLVTVSS

SEQ ID NO: 353 - protein, 123 aa, Artificial Sequence
  source: /note="Description of Artificial Sequence: Synthetic polypeptide"
  source: /note="Heavy Chain Combinations of TRPH-222 IgG histidine scanning variant #8"
EVQLVESGGGLVKPGGSLRLSCAASGFAFSIYDMSWVRQAPGKGLEWVAYISSGGGTTYYPDTVKGRFTISRDNAKNSLYLQMSSLRAEDTAMYYCHRHHGYGSSYGVLFAYWGQGTLVTVSS

SEQ ID NO: 354 - protein, 123 aa, Artificial Sequence
  source: /note="Description of Artificial Sequence: Synthetic polypeptide"
  source: /note="Heavy Chain Combinations of TRPH-222 IgG histidine scanning variant #9"
EVQLVESGGGLVKPGGSLRLSCAASGFAFSIYDMSWVRQAPGKGLEWVAYISSGGGTTYYPDTVKGRFTISRDNAKNSLYLQMSSLRAEDTAMYYCHRHSGYGSSYGVLFHYWGQGTLVTVSS

SEQ ID NO: 355 - protein, 123 aa, Artificial Sequence
  source: /note="Description of Artificial Sequence: Synthetic polypeptide"
  source: /note="Heavy Chain Combinations of TRPH-222 IgG histidine scanning variant #10"
EVQLVESGGGLVKPGGSLRLSCAASGFAFSIYDMSWVRQAPGKGLEWVAYISSGGGTTYYPDTVKGRFTISRDNAKNSLYLQMSSLRAEDTAMYYCARHHGYGSSYGVLFHYWGQGTLVTVSS

SEQ ID NO: 356 - protein, 123 aa, Artificial Sequence
  source: /note="Description of Artificial Sequence: Synthetic polypeptide"
  source: /note="Heavy Chain Combinations of TRPH-222 IgG histidine scanning variant #11"
EVQLVESGGGLVKPGGSLRLSCAASGFAFSIHDMSWVRQAPGKGLEWVAYISHGGGTTYYPDTVKGRFTISRDNAKNSLYLQMSSLRAEDTAMYYCHRHSGYGSSYGVLFAYWGQGTLVTVSS

SEQ ID NO: 357 - protein, 123 aa, Artificial Sequence
  source: /note="Description of Artificial Sequence: Synthetic polypeptide"
  source: /note="Heavy Chain Combinations of TRPH-222 IgG histidine scanning variant #12"
EVQLVESGGGLVKPGGSLRLSCAASGFAFSIHDMSWVRQAPGKGLEWVAYISHGGGTTYYPDTVKGRFTISRDNAKNSLYLQMSSLRAEDTAMYYCARHHGYGSSYGVLFAYWGQGTLVTVSS

SEQ ID NO: 358 - protein, 123 aa, Artificial Sequence
  source: /note="Description of Artificial Sequence: Synthetic polypeptide"
  source: /note="Heavy Chain Combinations of TRPH-222 IgG histidine scanning variant #13"
EVQLVESGGGLVKPGGSLRLSCAASGFAFSIHDMSWVRQAPGKGLEWVAYISHGGGTTYYPDTVKGRFTISRDNAKNSLYLQMSSLRAEDTAMYYCARHSGYGSSYGVLFHYWGQGTLVTVSS

SEQ ID NO: 359 - protein, 123 aa, Artificial Sequence
  source: /note="Description of Artificial Sequence: Synthetic polypeptide"
  source: /note="Heavy Chain Combinations of TRPH-222 IgG histidine scanning variant #14"
EVQLVESGGGLVKPGGSLRLSCAASGFAFSIHDMSWVRQAPGKGLEWVAYISSGGGTTYYPDTVKGRFTISRDNAKNSLYLQMSSLRAEDTAMYYCHRHHGYGSSYGVLFAYWGQGTLVTVSS

SEQ ID NO: 360 - protein, 123 aa, Artificial Sequence
  source: /note="Description of Artificial Sequence: Synthetic polypeptide"
  source: /note="Heavy Chain Combinations of TRPH-222 IgG histidine scanning variant #15"
EVQLVESGGGLVKPGGSLRLSCAASGFAFSIHDMSWVRQAPGKGLEWVAYISSGGGTTYYPDTVKGRFTISRDNAKNSLYLQMSSLRAEDTAMYYCHRHSGYGSSYGVLFHYWGQGTLVTVSS

SEQ ID NO: 361 - protein, 123 aa, Artificial Sequence
  source: /note="Description of Artificial Sequence: Synthetic polypeptide"
  source: /note="Heavy Chain Combinations of TRPH-222 IgG histidine scanning variant #16"
EVQLVESGGGLVKPGGSLRLSCAASGFAFSIHDMSWVRQAPGKGLEWVAYISSGGGTTYYPDTVKGRFTISRDNAKNSLYLQMSSLRAEDTAMYYCARHHGYGSSYGVLFHYWGQGTLVTVSS

SEQ ID NO: 362 - protein, 123 aa, Artificial Sequence
  source: /note="Description of Artificial Sequence: Synthetic polypeptide"
  source: /note="Heavy Chain Combinations of TRPH-222 IgG histidine scanning variant #17"
EVQLVESGGGLVKPGGSLRLSCAASGFAFSIYDMSWVRQAPGKGLEWVAYISHGGGTTYYPDTVKGRFTISRDNAKNSLYLQMSSLRAEDTAMYYCHRHHGYGSSYGVLFAYWGQGTLVTVSS

SEQ ID NO: 363 - protein, 123 aa, Artificial Sequence
  source: /note="Description of Artificial Sequence: Synthetic polypeptide"
  source: /note="Heavy Chain Combinations of TRPH-222 IgG histidine scanning variant #18"
EVQLVESGGGLVKPGGSLRLSCAASGFAFSIYDMSWVRQAPGKGLEWVAYISHGGGTTYYPDTVKGRFTISRDNAKNSLYLQMSSLRAEDTAMYYCHRHSGYGSSYGVLFHYWGQGTLVTVSS

SEQ ID NO: 364 - protein, 123 aa, Artificial Sequence
  source: /note="Description of Artificial Sequence: Synthetic polypeptide"
  source: /note="Heavy Chain Combinations of TRPH-222 IgG histidine scanning variant #19"
EVQLVESGGGLVKPGGSLRLSCAASGFAFSIYDMSWVRQAPGKGLEWVAYISHGGGTTYYPDTVKGRFTISRDNAKNSLYLQMSSLRAEDTAMYYCARHHGYGSSYGVLFHYWGQGTLVTVSS

SEQ ID NO: 365 - protein, 123 aa, Artificial Sequence
  source: /note="Description of Artificial Sequence: Synthetic polypeptide"
  source: /note="Heavy Chain Combinations of TRPH-222 IgG histidine scanning variant #20"
EVQLVESGGGLVKPGGSLRLSCAASGFAFSIYDMSWVRQAPGKGLEWVAYISSGGGTTYYPDTVKGRFTISRDNAKNSLYLQMSSLRAEDTAMYYCHRHHGYGSSYGVLFHYWGQGTLVTVSS

SEQ ID NO: 366 - protein, 116 aa, Artificial Sequence [sequence omitted]

SEQ ID NO: 367 - protein, 112 aa, Artificial Sequence
  source: /note="Description of Artificial Sequence: Synthetic polypeptide"
  source: /note="Light Chain of ADCT-602 IgG"
DIQLTQSPSSLSASVGDRVTMSCKSSQSVLYSANHKNYLAWYQQKPGKAPKLLIYWASTRESGVPSRFSGSGSGTDFTFTISSLQPEDIATYYCHQYLSSWTFGGGTKVQIK

SEQ ID NO: 368 - protein, 10 aa, Artificial Sequence
  source: /note="Description of Artificial Sequence: Synthetic peptide"
  source: /note="Heavy Chain CDR1 of ADCT-602"
GYTFTSYWLH

SEQ ID NO: 369 - protein, 17 aa, Artificial Sequence
  source: /note="Description of Artificial Sequence: Synthetic peptide"
  source: /note="Heavy Chain CDR2 of ADCT-602"
YINPRNDYTEYNQNFKD

SEQ ID NO: 370 - protein, 9 aa, Artificial Sequence
  source: /note="Description of Artificial Sequence: Synthetic peptide"
  source: /note="Heavy Chain CDR3 of ADCT-602"
ARRDITTFY

SEQ ID NO: 371 - protein, 17 aa, Artificial Sequence
  source: /note="Description of Artificial Sequence: Synthetic peptide"
  source: /note="Light Chain CDR1 of ADCT-602"
KSSQSVLYSANHKNYLA

SEQ ID NO: 372 - protein, 7 aa, Artificial Sequence
  source: /note="Description of Artificial Sequence: Synthetic peptide"
  source: /note="Light Chain CDR2 of ADCT-602"
WASTRES

SEQ ID NO: 373 - protein, 8 aa, Artificial Sequence
  source: /note="Description of Artificial Sequence: Synthetic peptide"
  source: /note="Light Chain CDR3 of ADCT-602"
HQYLSSWT

SEQ ID NO: 374 - protein, 116 aa, Artificial Sequence
  source: /note="Description of Artificial Sequence: Synthetic polypeptide"
  source: /note="Heavy Chain of ADCT-602 IgG histidine scanning variant #1"
QVQLVQSGAEVKKPGSSVKVSCKASHYTFTSYWLHWVRQAPGQGLEWIGYINPRNDYTEYNQNFKDKATITADESTNTAYMELSSLRSEDTAFYFCARRDITTFYWGQGTTVTVSS

SEQ ID NO: 375 - protein, 116 aa, Artificial Sequence
  source: /note="Description of Artificial Sequence: Synthetic polypeptide"
  source: /note="Heavy Chain of ADCT-602 IgG histidine scanning variant #2"
QVQLVQSGAEVKKPGSSVKVSCKASGHTFTSYWLHWVRQAPGQGLEWIGYINPRNDYTEYNQNFKDKATITADESTNTAYMELSSLRSEDTAFYFCARRDITTFYWGQGTTVTVSS

SEQ ID NO: 376 - protein, 116 aa, Artificial Sequence
  source: /note="Description of Artificial Sequence: Synthetic polypeptide"
  source: /note="Heavy Chain of ADCT-602 IgG histidine scanning variant #3"
QVQLVQSGAEVKKPGSSVKVSCKASGYHFTSYWLHWVRQAPGQGLEWIGYINPRNDYTEYNQNFKDKATITADESTNTAYMELSSLRSEDTAFYFCARRDITTFYWGQGTTVTVSS

SEQ ID NO: 377 - protein, 116 aa, Artificial Sequence
  source: /note="Description of Artificial Sequence: Synthetic polypeptide"
  source: /note="Heavy Chain of ADCT-602 IgG histidine scanning variant #4"
QVQLVQSGAEVKKPGSSVKVSCKASGYTHTSYWLHWVRQAPGQGLEWIGYINPRNDYTEYNQNFKDKATITADESTNTAYMELSSLRSEDTAFYFCARRDITTFYWGQGTTVTVSS

SEQ ID NO: 378 - protein, 116 aa, Artificial Sequence
  source: /note="Description of Artificial Sequence: Synthetic polypeptide"
  source: /note="Heavy Chain of ADCT-602 IgG histidine scanning variant #5"
QVQLVQSGAEVKKPGSSVKVSCKASGYTFHSYWLHWVRQAPGQGLEWIGYINPRNDYTEYNQNFKDKATITADESTNTAYMELSSLRSEDTAFYFCARRDITTFYWGQGTTVTVSS

SEQ ID NO: 379 - protein, 116 aa, Artificial Sequence
  source: /note="Description of Artificial Sequence: Synthetic polypeptide"
  source: /note="Heavy Chain of ADCT-602 IgG histidine scanning variant #6"
QVQLVQSGAEVKKPGSSVKVSCKASGYTFTHYWLHWVRQAPGQGLEWIGYINPRNDYTEYNQNFKDKATITADESTNTAYMELSSLRSEDTAFYFCARRDITTFYWGQGTTVTVSS

SEQ ID NO: 380 - protein, 116 aa, Artificial Sequence
  source: /note="Description of Artificial Sequence: Synthetic polypeptide"
  source: /note="Heavy Chain of ADCT-602 IgG histidine scanning variant #7"
QVQLVQSGAEVKKPGSSVKVSCKASGYTFTSHWLHWVRQAPGQGLEWIGYINPRNDYTEYNQNFKDKATITADESTNTAYMELSSLRSEDTAFYFCARRDITTFYWGQGTTVTVSS

SEQ ID NO: 381 - protein, 116 aa, Artificial Sequence
  source: /note="Description of Artificial Sequence: Synthetic polypeptide"
  source: /note="Heavy Chain of ADCT-602 IgG histidine scanning variant #8"
QVQLVQSGAEVKKPGSSVKVSCKASGYTFTSYHLHWVRQAPGQGLEWIGYINPRNDYTEYNQNFKDKATITADESTNTAYMELSSLRSEDTAFYFCARRDITTFYWGQGTTVTVSS

SEQ ID NO: 382 - protein, 116 aa, Artificial Sequence
  source: /note="Description of Artificial Sequence: Synthetic polypeptide"
  source: /note="Heavy Chain of ADCT-602 IgG histidine scanning variant #9"
QVQLVQSGAEVKKPGSSVKVSCKASGYTFTSYWHHWVRQAPGQGLEWIGYINPRNDYTEYNQNFKDKATITADESTNTAYMELSSLRSEDTAFYFCARRDITTFYWGQGTTVTVSS

SEQ ID NO: 383 - protein, 116 aa, Artificial Sequence
  source: /note="Description of Artificial Sequence: Synthetic polypeptide"
  source: /note="Heavy Chain of ADCT-602 IgG histidine scanning variant #10"
QVQLVQSGAEVKKPGSSVKVSCKASGYTFTSYWLAWVRQAPGQGLEWIGYINPRNDYTEYNQNFKDKATITADESTNTAYMELSSLRSEDTAFYFCARRDITTFYWGQGTTVTVSS

SEQ ID NO: 384 - protein, 116 aa, Artificial Sequence
  source: /note="Description of Artificial Sequence: Synthetic polypeptide"
  source: /note="Heavy Chain of ADCT-602 IgG histidine scanning variant #11"
QVQLVQSGAEVKKPGSSVKVSCKASGYTFTSYWLHWVRQAPGQGLEWIGHINPRNDYTEYNQNFKDKATITADESTNTAYMELSSLRSEDTAFYFCARRDITTFYWGQGTTVTVSS

SEQ ID NO: 385 - protein, 116 aa, Artificial Sequence
  source: /note="Description of Artificial Sequence: Synthetic polypeptide"
  source: /note="Heavy Chain of ADCT-602 IgG histidine scanning variant #12"
QVQLVQSGAEVKKPGSSVKVSCKASGYTFTSYWLHWVRQAPGQGLEWIGYHNPRNDYTEYNQNFKDKATITADESTNTAYMELSSLRSEDTAFYFCARRDITTFYWGQGTTVTVSS

SEQ ID NO: 386 - protein, 116 aa, Artificial Sequence
  source: /note="Description of Artificial Sequence: Synthetic polypeptide"
  source: /note="Heavy Chain of ADCT-602 IgG histidine scanning variant #13"
QVQLVQSGAEVKKPGSSVKVSCKASGYTFTSYWLHWVRQAPGQGLEWIGYIHPRNDYTEYNQNFKDKATITADESTNTAYMELSSLRSEDTAFYFCARRDITTFYWGQGTTVTVSS

SEQ ID NO: 387 - protein, 116 aa, Artificial Sequence
  source: /note="Description of Artificial Sequence: Synthetic polypeptide"
  source: /note="Heavy Chain of ADCT-602 IgG histidine scanning variant #14"
QVQLVQSGAEVKKPGSSVKVSCKASGYTFTSYWLHWVRQAPGQGLEWIGYINHRNDYTEYNQNFKDKATITADESTNTAYMELSSLRSEDTAFYFCARRDITTFYWGQGTTVTVSS

SEQ ID NO: 388 - protein, 116 aa, Artificial Sequence
  source: /note="Description of Artificial Sequence: Synthetic polypeptide"
  source: /note="Heavy Chain of ADCT-602 IgG histidine scanning variant #15"
QVQLVQSGAEVKKPGSSVKVSCKASGYTFTSYWLHWVRQAPGQGLEWIGYINPHNDYTEYNQNFKDKATITADESTNTAYMELSSLRSEDTAFYFCARRDITTFYWGQGTTVTVSS

SEQ ID NO: 389 - protein, 116 aa, Artificial Sequence
  source: /note="Description of Artificial Sequence: Synthetic polypeptide"
  source: /note="Heavy Chain of ADCT-602 IgG histidine scanning variant #16"
QVQLVQSGAEVKKPGSSVKVSCKASGYTFTSYWLHWVRQAPGQGLEWIGYINPRHDYTEYNQNFKDKATITADESTNTAYMELSSLRSEDTAFYFCARRDITTFYWGQGTTVTVSS

SEQ ID NO: 390 - protein, 116 aa, Artificial Sequence
  source: /note="Description of Artificial Sequence: Synthetic polypeptide"
  source: /note="Heavy Chain of ADCT-602 IgG histidine scanning variant #17"
QVQLVQSGAEVKKPGSSVKVSCKASGYTFTSYWLHWVRQAPGQGLEWIGYINPRNHYTEYNQNFKDKATITADESTNTAYMELSSLRSEDTAFYFCARRDITTFYWGQGTTVTVSS

SEQ ID NO: 391 - protein, 116 aa, Artificial Sequence
  source: /note="Description of Artificial Sequence: Synthetic polypeptide"
  source: /note="Heavy Chain of ADCT-602 IgG histidine scanning variant #18"
QVQLVQSGAEVKKPGSSVKVSCKASGYTFTSYWLHWVRQAPGQGLEWIGYINPRNDHTEYNQNFKDKATITADESTNTAYMELSSLRSEDTAFYFCARRDITTFYWGQGTTVTVSS

SEQ ID NO: 392 - protein, 116 aa, Artificial Sequence
  source: /note="Description of Artificial Sequence: Synthetic polypeptide"
  source: /note="Heavy Chain of ADCT-602 IgG histidine scanning variant #19"
QVQLVQSGAEVKKPGSSVKVSCKASGYTFTSYWLHWVRQAPGQGLEWIGYINPRNDYHEYNQNFKDKATITADESTNTAYMELSSLRSEDTAFYFCARRDITTFYWGQGTTVTVSS

SEQ ID NO: 393 - protein, 116 aa, Artificial Sequence
  source: /note="Description of Artificial Sequence: Synthetic polypeptide"
  source: /note="Heavy Chain of ADCT-602 IgG histidine scanning variant #20"
QVQLVQSGAEVKKPGSSVKVSCKASGYTFTSYWLHWVRQAPGQGLEWIGYINPRNDYTHYNQNFKDKATITADESTNTAYMELSSLRSEDTAFYFCARRDITTFYWGQGTTVTVSS

SEQ ID NO: 394 - protein, 116 aa, Artificial Sequence
  source: /note="Description of Artificial Sequence: Synthetic polypeptide"
  source: /note="Heavy Chain of ADCT-602 IgG histidine scanning variant #21"
QVQLVQSGAEVKKPGSSVKVSCKASGYTFTSYWLHWVRQAPGQGLEWIGYINPRNDYTEHNQNFKDKATITADESTNTAYMELSSLRSEDTAFYFCARRDITTFYWGQGTTVTVSS

SEQ ID NO: 395 - protein, 116 aa, Artificial Sequence
  source: /note="Description of Artificial Sequence: Synthetic polypeptide"
  source: /note="Heavy Chain of ADCT-602 IgG histidine scanning variant #22"
QVQLVQSGAEVKKPGSSVKVSCKASGYTFTSYWLHWVRQAPGQGLEWIGYINPRNDYTEYHQNFKDKATITADESTNTAYMELSSLRSEDTAFYFCARRDITTFYWGQGTTVTVSS

SEQ ID NO: 396 - protein, 116 aa, Artificial Sequence
  source: /note="Description of Artificial Sequence: Synthetic polypeptide"
  source: /note="Heavy Chain of ADCT-602 IgG histidine scanning variant #23"
QVQLVQSGAEVKKPGSSVKVSCKASGYTFTSYWLHWVRQAPGQGLEWIGYINPRNDYTEYNHNFKDKATITADESTNTAYMELSSLRSEDTAFYFCARRDITTFYWGQGTTVTVSS

SEQ ID NO: 397 - protein, 116 aa, Artificial Sequence
  source: /note="Description of Artificial Sequence: Synthetic polypeptide"
  source: /note="Heavy Chain of ADCT-602 IgG histidine scanning variant #24"
QVQLVQSGAEVKKPGSSVKVSCKASGYTFTSYWLHWVRQAPGQGLEWIGYINPRNDYTEYNQHFKDKATITADESTNTAYMELSSLRSEDTAFYFCARRDITTFYWGQGTTVTVSS

SEQ ID NO: 398 - protein, 116 aa, Artificial Sequence
  source: /note="Description of Artificial Sequence: Synthetic polypeptide"
  source: /note="Heavy Chain of ADCT-602 IgG histidine scanning variant #25"
QVQLVQSGAEVKKPGSSVKVSCKASGYTFTSYWLHWVRQAPGQGLEWIGYINPRNDYTEYNQNHKDKATITADESTNTAYMELSSLRSEDTAFYFCARRDITTFYWGQGTTVTVSS

SEQ ID NO: 399 - protein, 116 aa, Artificial Sequence
  source: /note="Description of Artificial Sequence: Synthetic polypeptide"
  source: /note="Heavy Chain of ADCT-602 IgG histidine scanning variant #26"
QVQLVQSGAEVKKPGSSVKVSCKASGYTFTSYWLHWVRQAPGQGLEWIGYINPRNDYTEYNQNFHDKATITADESTNTAYMELSSLRSEDTAFYFCARRDITTFYWGQGTTVTVSS

SEQ ID NO: 400 - protein, 116 aa, Artificial Sequence
  source: /note="Description of Artificial Sequence: Synthetic polypeptide"
  source: /note="Heavy Chain of ADCT-602 IgG histidine scanning variant #27"
QVQLVQSGAEVKKPGSSVKVSCKASGYTFTSYWLHWVRQAPGQGLEWIGYINPRNDYTEYNQNFKHKATITADESTNTAYMELSSLRSEDTAFYFCARRDITTFYWGQGTTVTVSS

SEQ ID NO: 401 - protein, 116 aa, Artificial Sequence
  source: /note="Description of Artificial Sequence: Synthetic polypeptide"
  source: /note="Heavy Chain of ADCT-602 IgG histidine scanning variant #28"
QVQLVQSGAEVKKPGSSVKVSCKASGYTFTSYWLHWVRQAPGQGLEWIGYINPRNDYTEYNQNFKDKATITADESTNTAYMELSSLRSEDTAFYFCHRRDITTFYWGQGTTVTVSS

SEQ ID NO: 402 - protein, 116 aa, Artificial Sequence
  source: /note="Description of Artificial Sequence: Synthetic polypeptide"
  source: /note="Heavy Chain of ADCT-602 IgG histidine scanning variant #29"
QVQLVQSGAEVKKPGSSVKVSCKASGYTFTSYWLHWVRQAPGQGLEWIGYINPRNDYTEYNQNFKDKATITADESTNTAYMELSSLRSEDTAFYFCAHRDITTFYWGQGTTVTVSS

SEQ ID NO: 403 - protein, 116 aa, Artificial Sequence
  source: /note="Description of Artificial Sequence: Synthetic polypeptide"
  source: /note="Heavy Chain of ADCT-602 IgG histidine scanning variant #30"
QVQLVQSGAEVKKPGSSVKVSCKASGYTFTSYWLHWVRQAPGQGLEWIGYINPRNDYTEYNQNFKDKATITADESTNTAYMELSSLRSEDTAFYFCARHDITTFYWGQGTTVTVSS

SEQ ID NO: 404 - protein, 116 aa, Artificial Sequence
  source: /note="Description of Artificial Sequence: Synthetic polypeptide"
  source: /note="Heavy Chain of ADCT-602 IgG histidine scanning variant #31"
QVQLVQSGAEVKKPGSSVKVSCKASGYTFTSYWLHWVRQAPGQGLEWIGYINPRNDYTEYNQNFKDKATITADESTNTAYMELSSLRSEDTAFYFCARRHITTFYWGQGTTVTVSS

SEQ ID NO: 405 - protein, 116 aa, Artificial Sequence
  source: /note="Description of Artificial Sequence: Synthetic polypeptide"
  source: /note="Heavy Chain of ADCT-602 IgG histidine scanning variant #32"
QVQLVQSGAEVKKPGSSVKVSCKASGYTFTSYWLHWVRQAPGQGLEWIGYINPRNDYTEYNQNFKDKATITADESTNTAYMELSSLRSEDTAFYFCARRDHTTFYWGQGTTVTVSS

SEQ ID NO: 406 - protein, 116 aa, Artificial Sequence
  source: /note="Description of Artificial Sequence: Synthetic polypeptide"
  source: /note="Heavy Chain of ADCT-602 IgG histidine scanning variant #33"
QVQLVQSGAEVKKPGSSVKVSCKASGYTFTSYWLHWVRQAPGQGLEWIGYINPRNDYTEYNQNFKDKATITADESTNTAYMELSSLRSEDTAFYFCARRDIHTFYWGQGTTVTVSS

SEQ ID NO: 407 - protein, 116 aa, Artificial Sequence
  source: /note="Description of Artificial Sequence: Synthetic polypeptide"
  source: /note="Heavy Chain of ADCT-602 IgG histidine scanning variant #34"
QVQLVQSGAEVKKPGSSVKVSCKASGYTFTSYWLHWVRQAPGQGLEWIGYINPRNDYTEYNQNFKDKATITADESTNTAYMELSSLRSEDTAFYFCARRDITHFYWGQGTTVTVSS

SEQ ID NO: 408 - protein, 116 aa, Artificial Sequence
  source: /note="Description of Artificial Sequence: Synthetic polypeptide"
  source: /note="Heavy Chain of ADCT-602 IgG histidine scanning variant #35"
QVQLVQSGAEVKKPGSSVKVSCKASGYTFTSYWLHWVRQAPGQGLEWIGYINPRNDYTEYNQNFKDKATITADESTNTAYMELSSLRSEDTAFYFCARRDITTHYWGQGTTVTVSS

SEQ ID NO: 409 - protein, 116 aa, Artificial Sequence
  source: /note="Description of Artificial Sequence: Synthetic polypeptide"
  source: /note="Heavy Chain of ADCT-602 IgG histidine scanning variant #36"
QVQLVQSGAEVKKPGSSVKVSCKASGYTFTSYWLHWVRQAPGQGLEWIGYINPRNDYTEYNQNFKDKATITADESTNTAYMELSSLRSEDTAFYFCARRDITTFHWGQGTTVTVSS

SEQ ID NO: 410 - protein, 119 aa, Artificial Sequence
  source: /note="Description of Artificial Sequence: Synthetic polypeptide"
  source: /note="Heavy Chain of 12C5 IgG"
QVQLVQSGSELKKPGASVKVSCKASGYTFTSYAMNWVRQAPGQGLEWMGWINTNTGNPTYAQGFTGRFVFSLDTSVSTAYLQISSLKAEDTAVYYCARLFYYYFGMDVWGQGTTVTVSS

SEQ ID NO: 411 - protein, 110 aa, Artificial Sequence
  source: /note="Description of Artificial Sequence: Synthetic polypeptide"
  source: /note="Light Chain of 12C5 IgG"
QSALTQPASVSGSPGQSITISCTGTSSDVGSYNLVSWYQLHPGKAPKLMIYEVSKRPSGVSNRFSGSRSGNTASLTISGLQAEDEADYYCCSYANSSTLVFGGGTKLTVL

SEQ ID NO: 412 - protein, 13 aa, Artificial Sequence
  source: /note="Description of Artificial Sequence: Synthetic peptide"
  source: /note="Heavy Chain CDR1 of 12C5"
KASGYTFTSYAMN

SEQ ID NO: 413 - protein, 17 aa, Artificial Sequence
  source: /note="Description of Artificial Sequence: Synthetic peptide"
  source: /note="Heavy Chain CDR2 of 12C5"
WINTNTGNPTYAQGFTG

SEQ ID NO: 414 - protein, 10 aa, Artificial Sequence
  source: /note="Description of Artificial Sequence: Synthetic peptide"
  source: /note="Heavy Chain CDR3 of 12C5"
LFYYYFGMDV

SEQ ID NO: 415 - protein, 14 aa, Artificial Sequence
  source: /note="Description of Artificial Sequence: Synthetic peptide"
  source: /note="Light Chain CDR1 of 12C5"
TGTSSDVGSYNLVS

SEQ ID NO: 416 - protein, 7 aa, Artificial Sequence
  source: /note="Description of Artificial Sequence: Synthetic peptide"
  source: /note="Light Chain CDR2 of 12C5"
EVSKRPS

SEQ ID NO: 417 - protein, 9 aa, Artificial Sequence
  source: /note="Description of Artificial Sequence: Synthetic peptide"
  source: /note="Light Chain CDR3 of 12C5"
CSYANSSTL

SEQ ID NO: 418 - protein, 119 aa, Artificial Sequence
  source: /note="Description of Artificial Sequence: Synthetic polypeptide"
  source: /note="Heavy Chain of 12C5 IgG histidine scanning variant #1"
QVQLVQSGSELKKPGASVKVSCHASGYTFTSYAMNWVRQAPGQGLEWMGWINTNTGNPTYAQGFTGRFVFSLDTSVSTAYLQISSLKAEDTAVYYCARLFYYYFGMDVWGQGTTVTVSS

SEQ ID NO: 419 - protein, 119 aa, Artificial Sequence
  source: /note="Description of Artificial Sequence: Synthetic polypeptide"
  source: /note="Heavy Chain of 12C5 IgG histidine scanning variant #2"
QVQLVQSGSELKKPGASVKVSCKHSGYTFTSYAMNWVRQAPGQGLEWMGWINTNTGNPTYAQGFTGRFVFSLDTSVSTAYLQISSLKAEDTAVYYCARLFYYYFGMDVWGQGTTVTVSS

SEQ ID NO: 420 - protein, 119 aa, Artificial Sequence
  source: /note="Description of Artificial Sequence: Synthetic polypeptide"
  source: /note="Heavy Chain of 12C5 IgG histidine scanning variant #3"
QVQLVQSGSELKKPGASVKVSCKAHGYTFTSYAMNWVRQAPGQGLEWMGWINTNTGNPTYAQGFTGRFVFSLDTSVSTAYLQISSLKAEDTAVYYCARLFYYYFGMDVWGQGTTVTVSS

SEQ ID NO: 421 - protein, 119 aa, Artificial Sequence
  source: /note="Description of Artificial Sequence: Synthetic polypeptide"
  source: /note="Heavy Chain of 12C5 IgG histidine scanning variant #4"
QVQLVQSGSELKKPGASVKVSCKASHYTFTSYAMNWVRQAPGQGLEWMGWINTNTGNPTYAQGFTGRFVFSLDTSVSTAYLQISSLKAEDTAVYYCARLFYYYFGMDVWGQGTTVTVSS

SEQ ID NO: 422 - protein, 119 aa, Artificial Sequence
  source: /note="Description of Artificial Sequence: Synthetic polypeptide"
  source: /note="Heavy Chain of 12C5 IgG histidine scanning variant #5"
QVQLVQSGSELKKPGASVKVSCKASGHTFTSYAMNWVRQAPGQGLEWMGWINTNTGNPTYAQGFTGRFVFSLDTSVSTAYLQISSLKAEDTAVYYCARLFYYYFGMDVWGQGTTVTVSS

SEQ ID NO: 423 - protein, 119 aa, Artificial Sequence
  source: /note="Description of Artificial Sequence: Synthetic polypeptide"
  source: /note="Heavy Chain of 12C5 IgG histidine scanning variant #6"
QVQLVQSGSELKKPGASVKVSCKASGYHFTSYAMNWVRQAPGQGLEWMGWINTNTGNPTYAQGFTGRFVFSLDTSVSTAYLQISSLKAEDTAVYYCARLFYYYFGMDVWGQGTTVTVSS

SEQ ID NO: 424 - protein, 119 aa, Artificial Sequence
  source: /note="Description of Artificial Sequence: Synthetic polypeptide"
  source: /note="Heavy Chain of 12C5 IgG histidine scanning variant #7"
QVQLVQSGSELKKPGASVKVSCKASGYTHTSYAMNWVRQAPGQGLEWMGWINTNTGNPTYAQGFTGRFVFSLDTSVSTAYLQISSLKAEDTAVYYCARLFYYYFGMDVWGQGTTVTVSS

SEQ ID NO: 425 - protein, 119 aa, Artificial Sequence
  source: /note="Description of Artificial Sequence: Synthetic polypeptide"
  source: /note="Heavy Chain of 12C5 IgG histidine scanning variant #8"
QVQLVQSGSELKKPGASVKVSCKASGYTFHSYAMNWVRQAPGQGLEWMGWINTNTGNPTYAQGFTGRFVFSLDTSVSTAYLQISSLKAEDTAVYYCARLFYYYFGMDVWGQGTTVTVSS

SEQ ID NO: 426 - protein, 119 aa, Artificial Sequence
  source: /note="Description of Artificial Sequence: Synthetic polypeptide"
  source: /note="Heavy Chain of 12C5 IgG histidine scanning variant #9"
QVQLVQSGSELKKPGASVKVSCKASGYTFTHYAMNWVRQAPGQGLEWMGWINTNTGNPTYAQGFTGRFVFSLDTSVSTAYLQISSLKAEDTAVYYCARLFYYYFGMDVWGQGTTVTVSS

SEQ ID NO: 427 - protein, 119 aa, Artificial Sequence
  source: /note="Description of Artificial Sequence: Synthetic polypeptide"
  source: /note="Heavy Chain of 12C5 IgG histidine scanning variant #10"
QVQLVQSGSELKKPGASVKVSCKASGYTFTSHAMNWVRQAPGQGLEWMGWINTNTGNPTYAQGFTGRFVFSLDTSVSTAYLQISSLKAEDTAVYYCARLFYYYFGMDVWGQGTTVTVSS

SEQ ID NO: 428 - protein, 119 aa, Artificial Sequence
  source: /note="Description of Artificial Sequence: Synthetic polypeptide"
  source: /note="Heavy Chain of 12C5 IgG histidine scanning variant #11"
QVQLVQSGSELKKPGASVKVSCKASGYTFTSYHMNWVRQAPGQGLEWMGWINTNTGNPTYAQGFTGRFVFSLDTSVSTAYLQISSLKAEDTAVYYCARLFYYYFGMDVWGQGTTVTVSS

SEQ ID NO: 429 - protein, 119 aa, Artificial Sequence
  source: /note="Description of Artificial Sequence: Synthetic polypeptide"
  source: /note="Heavy Chain of 12C5 IgG histidine scanning variant #12"
QVQLVQSGSELKKPGASVKVSCKASGYTFTSYAHNWVRQAPGQGLEWMGWINTNTGNPTYAQGFTGRFVFSLDTSVSTAYLQISSLKAEDTAVYYCARLFYYYFGMDVWGQGTTVTVSS

SEQ ID NO: 430 - protein, 119 aa, Artificial Sequence
  source: /note="Description of Artificial Sequence: Synthetic polypeptide"
  source: /note="Heavy Chain of 12C5 IgG histidine scanning variant #13"
QVQLVQSGSELKKPGASVKVSCKASGYTFTSYAMHWVRQAPGQGLEWMGWINTNTGNPTYAQGFTGRFVFSLDTSVSTAYLQISSLKAEDTAVYYCARLFYYYFGMDVWGQGTTVTVSS

SEQ ID NO: 431 - protein, 119 aa, Artificial Sequence
  source: /note="Description of Artificial Sequence: Synthetic polypeptide"
  source: /note="Heavy Chain of 12C5 IgG histidine scanning variant #14"
QVQLVQSGSELKKPGASVKVSCKASGYTFTSYAMNWVRQAPGQGLEWMGHINTNTGNPTYAQGFTGRFVFSLDTSVSTAYLQISSLKAEDTAVYYCARLFYYYFGMDVWGQGTTVTVSS

SEQ ID NO: 432 - protein, 119 aa, Artificial Sequence
  source: /note="Description of Artificial Sequence: Synthetic polypeptide"
  source: /note="Heavy Chain of 12C5 IgG histidine scanning variant #15"
QVQLVQSGSELKKPGASVKVSCKASGYTFTSYAMNWVRQAPGQGLEWMGWHNTNTGNPTYAQGFTGRFVFSLDTSVSTAYLQISSLKAEDTAVYYCARLFYYYFGMDVWGQGTTVTVSS

SEQ ID NO: 433 - protein, 119 aa, Artificial Sequence
  source: /note="Description of Artificial Sequence: Synthetic polypeptide"
  source: /note="Heavy Chain of 12C5 IgG histidine scanning variant #16"
QVQLVQSGSELKKPGASVKVSCKASGYTFTSYAMNWVRQAPGQGLEWMGWIHTNTGNPTYAQGFTGRFVFSLDTSVSTAYLQISSLKAEDTAVYYCARLFYYYFGMDVWGQGTTVTVSS

SEQ ID NO: 434 - protein, 119 aa, Artificial Sequence
  source: /note="Description of Artificial Sequence: Synthetic polypeptide"
  source: /note="Heavy Chain of 12C5 IgG histidine scanning variant #17"
QVQLVQSGSELKKPGASVKVSCKASGYTFTSYAMNWVRQAPGQGLEWMGWINHNTGNPTYAQGFTGRFVFSLDTSVSTAYLQISSLKAEDTAVYYCARLFYYYFGMDVWGQGTTVTVSS

SEQ ID NO: 435 - protein, 119 aa, Artificial Sequence
  source: /note="Description of Artificial Sequence: Synthetic polypeptide"
  source: /note="Heavy Chain of 12C5 IgG histidine scanning variant #18"
QVQLVQSGSELKKPGASVKVSCKASGYTFTSYAMNWVRQAPGQGLEWMGWINTHTGNPTYAQGFTGRFVFSLDTSVSTAYLQISSLKAEDTAVYYCARLFYYYFGMDVWGQGTTVTVSS

SEQ ID NO: 436 - protein, 119 aa, Artificial Sequence
  source: /note="Description of Artificial Sequence: Synthetic polypeptide"
  source: /note="Heavy Chain of 12C5 IgG histidine scanning variant #19"
QVQLVQSGSELKKPGASVKVSCKASGYTFTSYAMNWVRQAPGQGLEWMGWINTNHGNPTYAQGFTGRFVFSLDTSVSTAYLQISSLKAEDTAVYYCARLFYYYFGMDVWGQGTTVTVSS

SEQ ID NO: 437 - protein, 119 aa, Artificial Sequence
  source: /note="Description of Artificial Sequence: Synthetic polypeptide"
  source: /note="Heavy Chain of 12C5 IgG histidine scanning variant #20"
QVQLVQSGSELKKPGASVKVSCKASGYTFTSYAMNWVRQAPGQGLEWMGWINTNTHNPTYAQGFTGRFVFSLDTSVSTAYLQISSLKAEDTAVYYCARLFYYYFGMDVWGQGTTVTVSS

SEQ ID NO: 438 - protein, 119 aa, Artificial Sequence
  source: /note="Description of Artificial Sequence: Synthetic polypeptide"
  source: /note="Heavy Chain of 12C5 IgG histidine scanning variant #21"
QVQLVQSGSELKKPGASVKVSCKASGYTFTSYAMNWVRQAPGQGLEWMGWINTNTGHPTYAQGFTGRFVFSLDTSVSTAYLQISSLKAEDTAVYYCARLFYYYFGMDVWGQGTTVTVSS

SEQ ID NO: 439 - protein, 119 aa, Artificial Sequence
  source: /note="Description of Artificial Sequence: Synthetic polypeptide"
  source: /note="Heavy Chain of 12C5 IgG histidine scanning variant #22"
QVQLVQSGSELKKPGASVKVSCKASGYTFTSYAMNWVRQAPGQGLEWMGWINTNTGNHTYAQGFTGRFVFSLDTSVSTAYLQISSLKAEDTAVYYCARLFYYYFGMDVWGQGTTVTVSS

SEQ ID NO: 440 - protein, 119 aa, Artificial Sequence
  source: /note="Description of Artificial Sequence: Synthetic polypeptide"
  source: /note="Heavy Chain of 12C5 IgG histidine scanning variant #23"
QVQLVQSGSELKKPGASVKVSCKASGYTFTSYAMNWVRQAPGQGLEWMGWINTNTGNPHYAQGFTGRFVFSLDTSVSTAYLQISSLKAEDTAVYYCARLFYYYFGMDVWGQGTTVTVSS

SEQ ID NO: 441 - protein, 119 aa, Artificial Sequence
  source: /note="Description of Artificial Sequence: Synthetic polypeptide"
  source: /note="Heavy Chain of 12C5 IgG histidine scanning variant #24"
QVQLVQSGSELKKPGASVKVSCKASGYTFTSYAMNWVRQAPGQGLEWMGWINTNTGNPTHAQGFTGRFVFSLDTSVSTAYLQISSLKAEDTAVYYCARLFYYYFGMDVWGQGTTVTVSS

SEQ ID NO: 442 - protein, 119 aa, Artificial Sequence
  source: /note="Description of Artificial Sequence: Synthetic polypeptide"
  source: /note="Heavy Chain of 12C5 IgG histidine scanning variant #25"
QVQLVQSGSELKKPGASVKVSCKASGYTFTSYAMNWVRQAPGQGLEWMGWINTNTGNPTYHQGFTGRFVFSLDTSVSTAYLQISSLKAEDTAVYYCARLFYYYFGMDVWGQGTTVTVSS

SEQ ID NO: 443 - protein, 119 aa, Artificial Sequence
  source: /note="Description of Artificial Sequence: Synthetic polypeptide"
  source: /note="Heavy Chain of 12C5 IgG histidine scanning variant #26"
QVQLVQSGSELKKPGASVKVSCKASGYTFTSYAMNWVRQAPGQGLEWMGWINTNTGNPTYAHGFTGRFVFSLDTSVSTAYLQISSLKAEDTAVYYCARLFYYYFGMDVWGQGTTVTVSS

SEQ ID NO: 444 - protein, 119 aa, Artificial Sequence
  source: /note="Description of Artificial Sequence: Synthetic polypeptide"
  source: /note="Heavy Chain of 12C5 IgG histidine scanning variant #27"
QVQLVQSGSELKKPGASVKVSCKASGYTFTSYAMNWVRQAPGQGLEWMGWINTNTGNPTYAQHFTGRFVFSLDTSVSTAYLQISSLKAEDTAVYYCARLFYYYFGMDVWGQGTTVTVSS

SEQ ID NO: 445 - protein, 119 aa, Artificial Sequence
  source: /note="Description of Artificial Sequence: Synthetic polypeptide"
  source: /note="Heavy Chain of 12C5 IgG histidine scanning variant #28"
QVQLVQSGSELKKPGASVKVSCKASGYTFTSYAMNWVRQAPGQGLEWMGWINTNTGNPTYAQGHTGRFVFSLDTSVSTAYLQISSLKAEDTAVYYCARLFYYYFGMDVWGQGTTVTVSS

SEQ ID NO: 446 - protein, 119 aa, Artificial Sequence
  source: /note="Description of Artificial Sequence: Synthetic polypeptide"
  source: /note="Heavy Chain of 12C5 IgG histidine scanning variant #29"
QVQLVQSGSELKKPGASVKVSCKASGYTFTSYAMNWVRQAPGQGLEWMGWINTNTGNPTYAQGFHGRFVFSLDTSVSTAYLQISSLKAEDTAVYYCARLFYYYFGMDVWGQGTTVTVSS

SEQ ID NO: 447 - protein, 119 aa, Artificial Sequence
  source: /note="Description of Artificial Sequence: Synthetic polypeptide"
  source: /note="Heavy Chain of 12C5 IgG histidine scanning variant #30"
QVQLVQSGSELKKPGASVKVSCKASGYTFTSYAMNWVRQAPGQGLEWMGWINTNTGNPTYAQGFTHRFVFSLDTSVSTAYLQISSLKAEDTAVYYCARLFYYYFGMDVWGQGTTVTVSS

SEQ ID NO: 448 - protein, 119 aa, Artificial Sequence
  source: /note="Description of Artificial Sequence: Synthetic polypeptide"
  source: /note="Heavy Chain of 12C5 IgG histidine scanning variant #31"
QVQLVQSGSELKKPGASVKVSCKASGYTFTSYAMNWVRQAPGQGLEWMGWINTNTGNPTYAQGFTGRFVFSLDTSVSTAYLQISSLKAEDTAVYYCARHFYYYFGMDVWGQGTTVTVSS

SEQ ID NO: 449 - protein, 119 aa, Artificial Sequence
  source: /note="Description of Artificial Sequence: Synthetic polypeptide"
  source: /note="Heavy Chain of 12C5 IgG histidine scanning variant #32"
QVQLVQSGSELKKPGASVKVSCKASGYTFTSYAMNWVRQAPGQGLEWMGWINTNTGNPTYAQGFTGRFVFSLDTSVSTAYLQISSLKAEDTAVYYCARLHYYYFGMDVWGQGTTVTVSS

SEQ ID NO: 450 - protein, 119 aa, Artificial Sequence
  source: /note="Description of Artificial Sequence: Synthetic polypeptide"
  source: /note="Heavy Chain of 12C5 IgG histidine scanning variant #33"
QVQLVQSGSELKKPGASVKVSCKASGYTFTSYAMNWVRQAPGQGLEWMGWINTNTGNPTYAQGFTGRFVFSLDTSVSTAYLQISSLKAEDTAVYYCARLFHYYFGMDVWGQGTTVTVSS

SEQ ID NO: 451 - protein, 119 aa, Artificial Sequence
  source: /note="Description of Artificial Sequence: Synthetic polypeptide"
  source: /note="Heavy Chain of 12C5 IgG histidine scanning variant #34"
QVQLVQSGSELKKPGASVKVSCKASGYTFTSYAMNWVRQAPGQGLEWMGWINTNTGNPTYAQGFTGRFVFSLDTSVSTAYLQISSLKAEDTAVYYCARLFYHYFGMDVWGQGTTVTVSS

SEQ ID NO: 452 - protein, 119 aa, Artificial Sequence
  source: /note="Description of Artificial Sequence: Synthetic polypeptide"
  source: /note="Heavy Chain of 12C5 IgG histidine scanning variant #35"
QVQLVQSGSELKKPGASVKVSCKASGYTFTSYAMNWVRQAPGQGLEWMGWINTNTGNPTYAQGFTGRFVFSLDTSVSTAYLQISSLKAEDTAVYYCARLFYYHFGMDVWGQGTTVTVSS

SEQ ID NO: 453 - protein, 119 aa, Artificial Sequence
  source: /note="Description of Artificial Sequence: Synthetic polypeptide"
  source: /note="Heavy Chain of 12C5 IgG histidine scanning variant #36"
QVQLVQSGSELKKPGASVKVSCKASGYTFTSYAMNWVRQAPGQGLEWMGWINTNTGNPTYAQGFTGRFVFSLDTSVSTAYLQISSLKAEDTAVYYCARLFYYYHGMDVWGQGTTVTVSS

SEQ ID NO: 454 - protein, 119 aa, Artificial Sequence
  source: /note="Description of Artificial Sequence: Synthetic polypeptide"
  source: /note="Heavy Chain of 12C5 IgG histidine scanning variant #37"
QVQLVQSGSELKKPGASVKVSCKASGYTFTSYAMNWVRQAPGQGLEWMGWINTNTGNPTYAQGFTGRFVFSLDTSVSTAYLQISSLKAEDTAVYYCARLFYYYFHMDVWGQGTTVTVSS

SEQ ID NO: 455 - protein, 119 aa, Artificial Sequence
  source: /note="Description of Artificial Sequence: Synthetic polypeptide"
  source: /note="Heavy Chain of 12C5 IgG histidine scanning variant #38"
QVQLVQSGSELKKPGASVKVSCKASGYTFTSYAMNWVRQAPGQGLEWMGWINTNTGNPTYAQGFTGRFVFSLDTSVSTAYLQISSLKAEDTAVYYCARLFYYYFGHDVWGQGTTVTVSS

SEQ ID NO: 456 - protein, 119 aa, Artificial Sequence
  source: /note="Description of Artificial Sequence: Synthetic polypeptide"
  source: /note="Heavy Chain of 12C5 IgG histidine scanning variant #39"
QVQLVQSGSELKKPGASVKVSCKASGYTFTSYAMNWVRQAPGQGLEWMGWINTNTGNPTYAQGFTGRFVFSLDTSVSTAYLQISSLKAEDTAVYYCARLFYYYFGMHVWGQGTTVTVSS

SEQ ID NO: 457 - protein, 119 aa, Artificial Sequence
  source: /note="Description of Artificial Sequence: Synthetic polypeptide"
  source: /note="Heavy Chain of 12C5 IgG histidine scanning variant #40"
QVQLVQSGSELKKPGASVKVSCKASGYTFTSYAMNWVRQAPGQGLEWMGWINTNTGNPTYAQGFTGRFVFSLDTSVSTAYLQISSLKAEDTAVYYCARLFYYYFGMDHWGQGTTVTVSS

SEQ ID NO: 458 - protein, 110 aa, Artificial Sequence
  source: /note="Description of Artificial Sequence: Synthetic polypeptide"
  source: /note="Light Chain of 12C5 IgG histidine scanning variant #1"
QSALTQPASVSGSPGQSITISCHGTSSDVGSYNLVSWYQLHPGKAPKLMIYEVSKRPSGVSNRFSGSRSGNTASLTISGLQAEDEADYYCCSYANSSTLVFGGGTKLTVL

SEQ ID NO: 459 - protein, 110 aa, Artificial Sequence
  source: /note="Description of Artificial Sequence: Synthetic polypeptide"
  source: /note="Light Chain of 12C5 IgG histidine scanning variant #2"
QSALTQPASVSGSPGQSITISCTHTSSDVGSYNLVSWYQLHPGKAPKLMIYEVSKRPSGVSNRFSGSRSGNTASLTISGLQAEDEADYYCCSYANSSTLVFGGGTKLTVL

SEQ ID NO: 460 - protein, 110 aa, Artificial Sequence
  source: /note="Description of Artificial Sequence: Synthetic polypeptide"
  source: /note="Light Chain of 12C5 IgG histidine scanning variant #3"
QSALTQPASVSGSPGQSITISCTGHSSDVGSYNLVSWYQLHPGKAPKLMIYEVSKRPSGVSNRFSGSRSGNTASLTISGLQAEDEADYYCCSYANSSTLVFGGGTKLTVL

SEQ ID NO: 461 - protein, 110 aa, Artificial Sequence
  source: /note="Description of Artificial Sequence: Synthetic polypeptide"
  source: /note="Light Chain of 12C5 IgG histidine scanning variant #4"
QSALTQPASVSGSPGQSITISCTGTHSDVGSYNLVSWYQLHPGKAPKLMIYEVSKRPSGVSNRFSGSRSGNTASLTISGLQAEDEADYYCCSYANSSTLVFGGGTKLTVL

SEQ ID NO: 462 - protein, 110 aa, Artificial Sequence
  source: /note="Description of Artificial Sequence: Synthetic polypeptide"
  source: /note="Light Chain of 12C5 IgG histidine scanning variant #5"
QSALTQPASVSGSPGQSITISCTGTSHDVGSYNLVSWYQLHPGKAPKLMIYEVSKRPSGVSNRFSGSRSGNTASLTISGLQAEDEADYYCCSYANSSTLVFGGGTKLTVL

SEQ ID NO: 463 - protein, 110 aa, Artificial Sequence
  source: /note="Description of Artificial Sequence: Synthetic polypeptide"
  source: /note="Light Chain of 12C5 IgG histidine scanning variant #6"
QSALTQPASVSGSPGQSITISCTGTSSHVGSYNLVSWYQLHPGKAPKLMIYEVSKRPSGVSNRFSGSRSGNTASLTISGLQAEDEADYYCCSYANSSTLVFGGGTKLTVL

SEQ ID NO: 464 - protein, 110 aa, Artificial Sequence
  source: /note="Description of Artificial Sequence: Synthetic polypeptide"
  source: /note="Light Chain of 12C5 IgG histidine scanning variant #7"
QSALTQPASVSGSPGQSITISCTGTSSDHGSYNLVSWYQLHPGKAPKLMIYEVSKRPSGVSNRFSGSRSGNTASLTISGLQAEDEADYYCCSYANSSTLVFGGGTKLTVL

SEQ ID NO: 465 - protein, 110 aa, Artificial Sequence
  source: /note="Description of Artificial Sequence: Synthetic polypeptide"
  source: /note="Light Chain of 12C5 IgG histidine scanning variant #8"
QSALTQPASVSGSPGQSITISCTGTSSDVHSYNLVSWYQLHPGKAPKLMIYEVSKRPSGVSNRFSGSRSGNTASLTISGLQAEDEADYYCCSYANSSTLVFGGGTKLTVL

SEQ ID NO: 466 - protein, 110 aa, Artificial Sequence
  source: /note="Description of Artificial Sequence: Synthetic polypeptide"
  source: /note="Light Chain of 12C5 IgG histidine scanning variant #9"
QSALTQPASVSGSPGQSITISCTGTSSDVGHYNLVSWYQLHPGKAPKLMIYEVSKRPSGVSNRFSGSRSGNTASLTISGLQAEDEADYYCCSYANSSTLVFGGGTKLTVL

SEQ ID NO: 467 - protein, 110 aa, Artificial Sequence
  source: /note="Description of Artificial Sequence: Synthetic polypeptide"
  source: /note="Light Chain of 12C5 IgG histidine scanning variant #10"
QSALTQPASVSGSPGQSITISCTGTSSDVGSHNLVSWYQLHPGKAPKLMIYEVSKRPSGVSNRFSGSRSGNTASLTISGLQAEDEADYYCCSYANSSTLVFGGGTKLTVL

SEQ ID NO: 468 - protein, 110 aa, Artificial Sequence
  source: /note="Description of Artificial Sequence: Synthetic polypeptide"
  source: /note="Light Chain of 12C5 IgG histidine scanning variant #11"
QSALTQPASVSGSPGQSITISCTGTSSDVGSYHLVSWYQLHPGKAPKLMIYEVSKRPSGVSNRFSGSRSGNTASLTISGLQAEDEADYYCCSYANSSTLVFGGGTKLTVL

SEQ ID NO: 469 - protein, 110 aa, Artificial Sequence
  source: /note="Description of Artificial Sequence: Synthetic polypeptide"
  source: /note="Light Chain of 12C5 IgG histidine scanning variant #12"
QSALTQPASVSGSPGQSITISCTGTSSDVGSYNHVSWYQLHPGKAPKLMIYEVSKRPSGVSNRFSGSRSGNTASLTISGLQAEDEADYYCCSYANSSTLVFGGGTKLTVL

SEQ ID NO: 470 - protein, 110 aa, Artificial Sequence
  source: /note="Description of Artificial Sequence: Synthetic polypeptide"
  source: /note="Light Chain of 12C5 IgG histidine scanning variant #13"
QSALTQPASVSGSPGQSITISCTGTSSDVGSYNLHSWYQLHPGKAPKLMIYEVSKRPSGVSNRFSGSRSGNTASLTISGLQAEDEADYYCCSYANSSTLVFGGGTKLTVL

SEQ ID NO: 471 - protein, 110 aa, Artificial Sequence
  source: /note="Description of Artificial Sequence: Synthetic polypeptide"
  source: /note="Light Chain of 12C5 IgG histidine scanning variant #14"
QSALTQPASVSGSPGQSITISCTGTSSDVGSYNLVHWYQLHPGKAPKLMIYEVSKRPSGVSNRFSGSRSGNTASLTISGLQAEDEADYYCCSYANSSTLVFGGGTKLTVL

SEQ ID NO: 472 - protein, 110 aa, Artificial Sequence
  source: /note="Description of Artificial Sequence: Synthetic polypeptide"
  source: /note="Light Chain of 12C5 IgG histidine scanning variant #15"
QSALTQPASVSGSPGQSITISCTGTSSDVGSYNLVSWYQLHPGKAPKLMIYHVSKRPSGVSNRFSGSRSGNTASLTISGLQAEDEADYYCCSYANSSTLVFGGGTKLTVL

SEQ ID NO: 473 - protein, 110 aa, Artificial Sequence
  source: /note="Description of Artificial Sequence: Synthetic polypeptide"
  source: /note="Light Chain of 12C5 IgG histidine scanning variant #16"
QSALTQPASVSGSPGQSITISCTGTSSDVGSYNLVSWYQLHPGKAPKLMIYEHSKRPSGVSNRFSGSRSGNTASLTISGLQAEDEADYYCCSYANSSTLVFGGGTKLTVL

SEQ ID NO: 474 - protein, 110 aa, Artificial Sequence
  source: /note="Description of Artificial Sequence: Synthetic polypeptide"
  source: /note="Light Chain of 12C5 IgG histidine scanning variant #17"
QSALTQPASVSGSPGQSITISCTGTSSDVGSYNLVSWYQLHPGKAPKLMIYEVHKRPSGVSNRFSGSRSGNTASLTISGLQAEDEADYYCCSYANSSTLVFGGGTKLTVL

SEQ ID NO: 475 - protein, 110 aa, Artificial Sequence
  source: /note="Description of Artificial Sequence: Synthetic polypeptide"
  source: /note="Light Chain of 12C5 IgG histidine scanning variant #18"
QSALTQPASVSGSPGQSITISCTGTSSDVGSYNLVSWYQLHPGKAPKLMIYEVSHRPSGVSNRFSGSRSGNTASLTISGLQAEDEADYYCCSYANSSTLVFGGGTKLTVL

SEQ ID NO: 476 - protein, 110 aa, Artificial Sequence
  source: /note="Description of Artificial Sequence: Synthetic polypeptide"
  source: /note="Light Chain of 12C5 IgG histidine scanning variant #19"
QSALTQPASVSGSPGQSITISCTGTSSDVGSYNLVSWYQLHPGKAPKLMIYEVSKHPSGVSNRFSGSRSGNTASLTISGLQAEDEADYYCCSYANSSTLVFGGGTKLTVL

SEQ ID NO: 477 - protein, 110 aa, Artificial Sequence
  source: /note="Description of Artificial Sequence: Synthetic polypeptide"
  source: /note="Light Chain of 12C5 IgG histidine scanning variant #20"
QSALTQPASVSGSPGQSITISCTGTSSDVGSYNLVSWYQLHPGKAPKLMIYEVSKRHSGVSNRFSGSRSGNTASLTISGLQAEDEADYYCCSYANSSTLVFGGGTKLTVL

SEQ ID NO: 478 - protein, 110 aa, Artificial Sequence
  source: /note="Description of Artificial Sequence: Synthetic polypeptide"
  source: /note="Light Chain of 12C5 IgG histidine scanning variant #21"
QSALTQPASVSGSPGQSITISCTGTSSDVGSYNLVSWYQLHPGKAPKLMIYEVSKRPHGVSNRFSGSRSGNTASLTISGLQAEDEADYYCCSYANSSTLVFGGGTKLTVL

SEQ ID NO: 479 - protein, 110 aa, Artificial Sequence
  source: /note="Description of Artificial Sequence: Synthetic polypeptide"
  source: /note="Light Chain of 12C5 IgG histidine scanning variant #22"
QSALTQPASVSGSPGQSITISCTGTSSDVGSYNLVSWYQLHPGKAPKLMIYEVSKRPSGVSNRFSGSRSGNTASLTISGLQAEDEADYYCHSYANSSTLVFGGGTKLTVL

SEQ ID NO: 480 - protein, 110 aa, Artificial Sequence
  source: /note="Description of Artificial Sequence: Synthetic polypeptide"
  source: /note="Light Chain of 12C5 IgG histidine scanning variant #23"
QSALTQPASVSGSPGQSITISCTGTSSDVGSYNLVSWYQLHPGKAPKLMIYEVSKRPSGVSNRFSGSRSGNTASLTISGLQAEDEADYYCCHYANSSTLVFGGGTKLTVL

SEQ ID NO: 481 - protein, 110 aa, Artificial Sequence
  source: /note="Description of Artificial Sequence: Synthetic polypeptide"
  source: /note="Light Chain of 12C5 IgG histidine scanning variant #24"
QSALTQPASVSGSPGQSITISCTGTSSDVGSYNLVSWYQLHPGKAPKLMIYEVSKRPSGVSNRFSGSRSGNTASLTISGLQAEDEADYYCCSHANSSTLVFGGGTKLTVL

SEQ ID NO: 482 - protein, 110 aa, Artificial Sequence
  source: /note="Description of Artificial Sequence: Synthetic polypeptide"
  source: /note="Light Chain of 12C5 IgG histidine scanning variant #25"
QSALTQPASVSGSPGQSITISCTGTSSDVGSYNLVSWYQLHPGKAPKLMIYEVSKRPSGVSNRFSGSRSGNTASLTISGLQAEDEADYYCCSYHNSSTLVFGGGTKLTVL

SEQ ID NO: 483 - protein, 110 aa, Artificial Sequence
  source: /note="Description of Artificial Sequence: Synthetic polypeptide"
  source: /note="Light Chain of 12C5 IgG histidine scanning variant #26"
QSALTQPASVSGSPGQSITISCTGTSSDVGSYNLVSWYQLHPGKAPKLMIYEVSKRPSGVSNRFSGSRSGNTASLTISGLQAEDEADYYCCSYAHSSTLVFGGGTKLTVL

SEQ ID NO: 484 - protein, 110 aa, Artificial Sequence
  source: /note="Description of Artificial Sequence: Synthetic polypeptide"
  source: /note="Light Chain of 12C5 IgG histidine scanning variant #27"
QSALTQPASVSGSPGQSITISCTGTSSDVGSYNLVSWYQLHPGKAPKLMIYEVSKRPSGVSNRFSGSRSGNTASLTISGLQAEDEADYYCCSYANHSTLVFGGGTKLTVL

SEQ ID NO: 485 - protein, 110 aa, Artificial Sequence
  source: /note="Description of Artificial Sequence: Synthetic polypeptide"
  source: /note="Light Chain of 12C5 IgG histidine scanning variant #28"
QSALTQPASVSGSPGQSITISCTGTSSDVGSYNLVSWYQLHPGKAPKLMIYEVSKRPSGVSNRFSGSRSGNTASLTISGLQAEDEADYYCCSYANSHTLVFGGGTKLTVL

SEQ ID NO: 486 - protein, 110 aa, Artificial Sequence
  source: /note="Description of Artificial Sequence: Synthetic polypeptide"
  source: /note="Light Chain of 12C5 IgG histidine scanning variant #29"
QSALTQPASVSGSPGQSITISCTGTSSDVGSYNLVSWYQLHPGKAPKLMIYEVSKRPSGVSNRFSGSRSGNTASLTISGLQAEDEADYYCCSYANSSHLVFGGGTKLTVL

SEQ ID NO: 487 - protein, 110 aa, Artificial Sequence
  source: /note="Description of Artificial Sequence: Synthetic polypeptide"
  source: /note="Light Chain of 12C5 IgG histidine scanning variant #30"
QSALTQPASVSGSPGQSITISCTGTSSDVGSYNLVSWYQLHPGKAPKLMIYEVSKRPSGVSNRFSGSRSGNTASLTISGLQAEDEADYYCCSYANSSTHVFGGGTKLTVL

SEQ ID NO: 488 - protein, 110 aa, Artificial Sequence
  source: /note="Description of Artificial Sequence: Synthetic polypeptide"
  source: /note="Light Chain of 12C5 IgG histidine scanning variant #31"
QSALTQPASVSGSPGQSITISCTGTSSDVGSYNLVSWYQLHPGKAPKLMIYEVSKRPSGVSNRFSGSRSGNTASLTISGLQAEDEADYYCCSYANSSTLHFGGGTKLTVL

SEQ ID NO: 489 - protein, 122 aa, Artificial Sequence
  source: /note="Description of Artificial Sequence: Synthetic polypeptide"
  source: /note="Heavy Chain of 19A3 IgG"
QVQLQQWGAGLLKPSETLSLTCAVYGRSFSSYYWSWIRQPPGKGLEWIGDIQHSGSTNYNPSLKSRVTISVDTSKNQFSLKLSSVTAADTAVYYCAGTFYDILTGYYPLGYWGPGTLVTVSS

SEQ ID NO: 490 - protein, 106 aa, Artificial Sequence
  source: /note="Description of Artificial Sequence: Synthetic polypeptide"
  source: /note="Light Chain of 19A3 IgG"
EIVLTQSPATLSLSPGERATLSCRASQSVSSYLAWYQQKPGQAPRLLIYDASNRATGIPARFSGSGSGTDFTLTISSLEPEDFAVYYCQQRSNWPTFGQGTKVEIK

SEQ ID NO: 491 - protein, 13 aa, Artificial Sequence
  source: /note="Description of Artificial Sequence: Synthetic peptide"
  source: /note="Heavy Chain CDR1 of 19A3"
AVYGRSFSSYYWS

SEQ ID NO: 492 - protein, 16 aa, Artificial Sequence
  source: /note="Description of Artificial Sequence: Synthetic peptide"
  source: /note="Heavy Chain CDR2 of 19A3"
DIQHSGSTNYNPSLKS

SEQ ID NO: 493 - protein, 16 aa, Artificial Sequence
  source: /note="Description of Artificial Sequence: Synthetic peptide"
  source: /note="Heavy Chain CDR3 of 19A3"
AGTFYDILTGYYPLGY

SEQ ID NO: 494 - protein, 11 aa, Artificial Sequence
  source: /note="Description of Artificial Sequence: Synthetic peptide"
  source: /note="Light Chain CDR1 of 19A3"
RASQSVSSYLA

SEQ ID NO: 495 - protein, 7 aa, Artificial Sequence
  source: /note="Description of Artificial Sequence: Synthetic peptide"
  source: /note="Light Chain CDR2 of 19A3"
DASNRAT

SEQ ID NO: 496 - protein, 7 aa, Artificial Sequence
  source: /note="Description of Artificial Sequence: Synthetic peptide"
  source: /note="Light Chain CDR3 of 19A3"
QQRSNWP

SEQ ID NO: 497 - protein, 122 aa, Artificial Sequence
  source: /note="Description of Artificial Sequence: Synthetic polypeptide"
  source: /note="Heavy Chain of 19A3 IgG histidine scanning variant #1"
QVQLQQWGAGLLKPSETLSLTCHVYGRSFSSYYWSWIRQPPGKGLEWIGDIQHSGSTNYNPSLKSRVTISVDTSKNQFSLKLSSVTAADTAVYYCAGTFYDILTGYYPLGYWGPGTLVTVSS

SEQ ID NO: 498 - protein, 122 aa, Artificial Sequence
  source: /note="Description of Artificial Sequence: Synthetic polypeptide"
  source: /note="Heavy Chain of 19A3 IgG histidine scanning variant #2"
QVQLQQWGAGLLKPSETLSLTCAHYGRSFSSYYWSWIRQPPGKGLEWIGDIQHSGSTNYNPSLKSRVTISVDTSKNQFSLKLSSVTAADTAVYYCAGTFYDILTGYYPLGYWGPGTLVTVSS

SEQ ID NO: 499 - protein, 122 aa, Artificial Sequence
  source: /note="Description of Artificial Sequence: Synthetic polypeptide"
  source: /note="Heavy Chain of 19A3 IgG histidine scanning variant #3"
QVQLQQWGAGLLKPSETLSLTCAVHGRSFSSYYWSWIRQPPGKGLEWIGDIQHSGSTNYNPSLKSRVTISVDTSKNQFSLKLSSVTAADTAVYYCAGTFYDILTGYYPLGYWGPGTLVTVSS

SEQ ID NO: 500 - protein, 122 aa, Artificial Sequence
  source: /note="Description of Artificial Sequence: Synthetic polypeptide"
  source: /note="Heavy Chain of 19A3 IgG histidine scanning variant #4"
QVQLQQWGAGLLKPSETLSLTCAVYHRSFSSYYWSWIRQPPGKGLEWIGDIQHSGSTNYNPSLKSRVTISVDTSKNQFSLKLSSVTAADTAVYYCAGTFYDILTGYYPLGYWGPGTLVTVSS

SEQ ID NO: 501 - protein, 122 aa, Artificial Sequence
  source: /note="Description of Artificial Sequence: Synthetic polypeptide"
  source: /note="Heavy Chain of 19A3 IgG histidine scanning variant #5"
QVQLQQWGAGLLKPSETLSLTCAVYGHSFSSYYWSWIRQPPGKGLEWIGDIQHSGSTNYNPSLKSRVTISVDTSKNQFSLKLSSVTAADTAVYYCAGTFYDILTGYYPLGYWGPGTLVTVSS

SEQ ID NO: 502 - protein, 122 aa, Artificial Sequence
  source: /note="Description of Artificial Sequence: Synthetic polypeptide"
  source: /note="Heavy Chain of 19A3 IgG histidine scanning variant #6"
QVQLQQWGAGLLKPSETLSLTCAVYGRHFSSYYWSWIRQPPGKGLEWIGDIQHSGSTNYNPSLKSRVTISVDTSKNQFSLKLSSVTAADTAVYYCAGTFYDILTGYYPLGYWGPGTLVTVSS

SEQ ID NO: 503 - protein, 122 aa, Artificial Sequence
  source: /note="Description of Artificial Sequence: Synthetic polypeptide"
  source: /note="Heavy Chain of 19A3 IgG histidine scanning variant #7"
QVQLQQWGAGLLKPSETLSLTCAVYGRSHSSYYWSWIRQPPGKGLEWIGDIQHSGSTNYNPSLKSRVTISVDTSKNQFSLKLSSVTAADTAVYYCAGTFYDILTGYYPLGYWGPGTLVTVSS

SEQ ID NO: 504 - protein, 122 aa, Artificial Sequence
  source: /note="Description of Artificial Sequence: Synthetic polypeptide"
  source: /note="Heavy Chain of 19A3 IgG histidine scanning variant #8"
QVQLQQWGAGLLKPSETLSLTCAVYGRSFHSYYWSWIRQPPGKGLEWIGDIQHSGSTNYNPSLKSRVTISVDTSKNQFSLKLSSVTAADTAVYYCAGTFYDILTGYYPLGYWGPGTLVTVSS

SEQ ID NO: 505 - protein, 122 aa, Artificial Sequence
  source: /note="Description of Artificial Sequence: Synthetic polypeptide"
  source: /note="Heavy Chain of 19A3 IgG histidine scanning variant #9"
QVQLQQWGAGLLKPSETLSLTCAVYGRSFSHYYWSWIRQPPGKGLEWIGDIQHSGSTNYNPSLKSRVTISVDTSKNQFSLKLSSVTAADTAVYYCAGTFYDILTGYYPLGYWGPGTLVTVSS

SEQ ID NO: 506 - protein, 122 aa, Artificial Sequence
  source: /note="Description of Artificial Sequence: Synthetic polypeptide"
  source: /note="Heavy Chain of 19A3 IgG histidine scanning variant #10"
QVQLQQWGAGLLKPSETLSLTCAVYGRSFSSHYWSWIRQPPGKGLEWIGDIQHSGSTNYNPSLKSRVTISVDTSKNQFSLKLSSVTAADTAVYYCAGTFYDILTGYYPLGYWGPGTLVTVSS

SEQ ID NO: 507 - protein, 122 aa, Artificial Sequence
  source: /note="Description of Artificial Sequence: Synthetic polypeptide"
  source: /note="Heavy Chain of 19A3 IgG histidine scanning variant #11"
QVQLQQWGAGLLKPSETLSLTCAVYGRSFSSYHWSWIRQPPGKGLEWIGDIQHSGSTNYNPSLKSRVTISVDTSKNQFSLKLSSVTAADTAVYYCAGTFYDILTGYYPLGYWGPGTLVTVSS

SEQ ID NO: 508 - protein, 122 aa, Artificial Sequence
  source: /note="Description of Artificial Sequence: Synthetic polypeptide"
  source: /note="Heavy Chain of 19A3 IgG histidine scanning variant #12"
QVQLQQWGAGLLKPSETLSLTCAVYGRSFSSYYHSWIRQPPGKGLEWIGDIQHSGSTNYNPSLKSRVTISVDTSKNQFSLKLSSVTAADTAVYYCAGTFYDILTGYYPLGYWGPGTLVTVSS

SEQ ID NO: 509 - protein, 122 aa, Artificial Sequence
  source: /note="Description of Artificial Sequence: Synthetic polypeptide"
  source: /note="Heavy Chain of 19A3 IgG histidine scanning variant #13"
QVQLQQWGAGLLKPSETLSLTCAVYGRSFSSYYWHWIRQPPGKGLEWIGDIQHSGSTNYNPSLKSRVTISVDTSKNQFSLKLSSVTAADTAVYYCAGTFYDILTGYYPLGYWGPGTLVTVSS

SEQ ID NO: 510 - protein, 122 aa, Artificial Sequence
  source: /note="Description of Artificial Sequence: Synthetic polypeptide"
  source: /note="Heavy Chain of 19A3 IgG histidine scanning variant #14"
QVQLQQWGAGLLKPSETLSLTCAVYGRSFSSYYWSWIRQPPGKGLEWIGHIQHSGSTNYNPSLKSRVTISVDTSKNQFSLKLSSVTAADTAVYYCAGTFYDILTGYYPLGYWGPGTLVTVSS

SEQ ID NO: 511 - protein, 122 aa, Artificial Sequence
  source: /note="Description of Artificial Sequence: Synthetic polypeptide"
  source: /note="Heavy Chain of 19A3 IgG histidine scanning variant #15"
QVQLQQWGAGLLKPSETLSLTCAVYGRSFSSYYWSWIRQPPGKGLEWIGDHQHSGSTNYNPSLKSRVTISVDTSKNQFSLKLSSVTAADTAVYYCAGTFYDILTGYYPLGYWGPGTLVTVSS

SEQ ID NO: 512 - protein, 122 aa, Artificial Sequence
  source: /note="Description of Artificial Sequence: Synthetic polypeptide"
  source: /note="Heavy Chain of 19A3 IgG histidine scanning variant #16"
QVQLQQWGAGLLKPSETLSLTCAVYGRSFSSYYWSWIRQPPGKGLEWIGDIHHSGSTNYNPSLKSRVTISVDTSKNQFSLKLSSVTAADTAVYYCAGTFYDILTGYYPLGYWGPGTLVTVSS

SEQ ID NO: 513 - protein, 122 aa, Artificial Sequence
  source: /note="Description of Artificial Sequence: Synthetic polypeptide"
  source: /note="Heavy Chain of 19A3 IgG histidine scanning variant #17"
QVQLQQWGAGLLKPSETLSLTCAVYGRSFSSYYWSWIRQPPGKGLEWIGDIQASGSTNYNPSLKSRVTISVDTSKNQFSLKLSSVTAADTAVYYCAGTFYDILTGYYPLGYWGPGTLVTVSS

SEQ ID NO: 514 - protein, 122 aa, Artificial Sequence
  source: /note="Description of Artificial Sequence: Synthetic polypeptide"
  source: /note="Heavy Chain of 19A3 IgG histidine scanning variant #18"
QVQLQQWGAGLLKPSETLSLTCAVYGRSFSSYYWSWIRQPPGKGLEWIGDIQHHGSTNYNPSLKSRVTISVDTSKNQFSLKLSSVTAADTAVYYCAGTFYDILTGYYPLGYWGPGTLVTVSS

SEQ ID NO: 515 - protein, 122 aa, Artificial Sequence
  source: /note="Description of Artificial Sequence: Synthetic polypeptide"
  source: /note="Heavy Chain of 19A3 IgG histidine scanning variant #19"
QVQLQQWGAGLLKPSETLSLTCAVYGRSFSSYYWSWIRQPPGKGLEWIGDIQHSHSTNYNPSLKSRVTISVDTSKNQFSLKLSSVTAADTAVYYCAGTFYDILTGYYPLGYWGPGTLVTVSS

SEQ ID NO: 516 - protein, 122 aa, Artificial Sequence
  source: /note="Description of Artificial Sequence: Synthetic polypeptide"
  source: /note="Heavy Chain of 19A3 IgG histidine scanning variant #20"
QVQLQQWGAGLLKPSETLSLTCAVYGRSFSSYYWSWIRQPPGKGLEWIGDIQHSGHTNYNPSLKSRVTISVDTSKNQFSLKLSSVTAADTAVYYCAGTFYDILTGYYPLGYWGPGTLVTVSS

SEQ ID NO: 517 - protein, 122 aa, Artificial Sequence
  source: /note="Description of Artificial Sequence: Synthetic polypeptide"
  source: /note="Heavy Chain of 19A3 IgG histidine scanning variant #21"
QVQLQQWGAGLLKPSETLSLTCAVYGRSFSSYYWSWIRQPPGKGLEWIGDIQHSGSHNYNPSLKSRVTISVDTSKNQFSLKLSSVTAADTAVYYCAGTFYDILTGYYPLGYWGPGTLVTVSS

SEQ ID NO: 518 - protein, 122 aa, Artificial Sequence
  source: /note="Description of Artificial Sequence: Synthetic polypeptide"
  source: /note="Heavy Chain of 19A3 IgG histidine scanning variant #22"
QVQLQQWGAGLLKPSETLSLTCAVYGRSFSSYYWSWIRQPPGKGLEWIGDIQHSGSTHYNPSLKSRVTISVDTSKNQFSLKLSSVTAADTAVYYCAGTFYDILTGYYPLGYWGPGTLVTVSS

SEQ ID NO: 519 - protein, 122 aa, Artificial Sequence
  source: /note="Description of Artificial Sequence: Synthetic polypeptide"
  source: /note="Heavy Chain of 19A3 IgG histidine scanning variant #23"
QVQLQQWGAGLLKPSETLSLTCAVYGRSFSSYYWSWIRQPPGKGLEWIGDIQHSGSTNHNPSLKSRVTISVDTSKNQFSLKLSSVTAADTAVYYCAGTFYDILTGYYPLGYWGPGTLVTVSS

SEQ ID NO: 520 - protein, 122 aa, Artificial Sequence
  source: /note="Description of Artificial Sequence: Synthetic polypeptide"
  source: /note="Heavy Chain of 19A3 IgG histidine scanning variant #24"
QVQLQQWGAGLLKPSETLSLTCAVYGRSFSSYYWSWIRQPPGKGLEWIGDIQHSGSTNYHPSLKSRVTISVDTSKNQFSLKLSSVTAADTAVYYCAGTFYDILTGYYPLGYWGPGTLVTVSS

SEQ ID NO: 521 - protein, 122 aa, Artificial Sequence
  source: /note="Description of Artificial Sequence: Synthetic polypeptide"
  source: /note="Heavy Chain of 19A3 IgG histidine scanning variant #25"
QVQLQQWGAGLLKPSETLSLTCAVYGRSFSSYYWSWIRQPPGKGLEWIGDIQHSGSTNYNHSLKSRVTISVDTSKNQFSLKLSSVTAADTAVYYCAGTFYDILTGYYPLGYWGPGTLVTVSS

SEQ ID NO: 522 - protein, 122 aa, Artificial Sequence
  source: /note="Description of Artificial Sequence: Synthetic polypeptide"
  source: /note="Heavy Chain of 19A3 IgG histidine scanning variant #26"
QVQLQQWGAGLLKPSETLSLTCAVYGRSFSSYYWSWIRQPPGKGLEWIGDIQHSGSTNYNPHLKSRVTISVDTSKNQFSLKLSSVTAADTAVYYCAGTFYDILTGYYPLGYWGPGTLVTVSS

SEQ ID NO: 523 - protein, 122 aa, Artificial Sequence
  source: /note="Description of Artificial Sequence: Synthetic polypeptide"
  source: /note="Heavy Chain of 19A3 IgG histidine scanning variant #27"
QVQLQQWGAGLLKPSETLSLTCAVYGRSFSSYYWSWIRQPPGKGLEWIGDIQHSGSTNYNPSHKSRVTISVDTSKNQFSLKLSSVTAADTAVYYCAGTFYDILTGYYPLGYWGPGTLVTVSS

SEQ ID NO: 524 - protein, 122 aa, Artificial Sequence
  source: /note="Description of Artificial Sequence: Synthetic polypeptide"
  source: /note="Heavy Chain of 19A3 IgG histidine scanning variant #28"
QVQLQQWGAGLLKPSETLSLTCAVYGRSFSSYYWSWIRQPPGKGLEWIGDIQHSGSTNYNPSLHSRVTISVDTSKNQFSLKLSSVTAADTAVYYCAGTFYDILTGYYPLGYWGPGTLVTVSS

SEQ ID NO: 525 - protein, 122 aa, Artificial Sequence
  source: /note="Description of Artificial Sequence: Synthetic polypeptide"
  source: /note="Heavy Chain of 19A3 IgG histidine scanning variant #29"
QVQLQQWGAGLLKPSETLSLTCAVYGRSFSSYYWSWIRQPPGKGLEWIGDIQHSGSTNYNPSLKHRVTISVDTSKNQFSLKLSSVTAADTAVYYCAGTFYDILTGYYPLGYWGPGTLVTVSS

SEQ ID NO: 526 - protein, 122 aa, Artificial Sequence
  source: /note="Description of Artificial Sequence: Synthetic polypeptide"
  source: /note="Heavy Chain of 19A3 IgG histidine scanning variant #30"
QVQLQQWGAGLLKPSETLSLTCAVYGRSFSSYYWSWIRQPPGKGLEWIGDIQHSGSTNYNPSLKSRVTISVDTSKNQFSLKLSSVTAADTAVYYCHGTFYDILTGYYPLGYWGPGTLVTVSS

SEQ ID NO: 527 - protein, 122 aa, Artificial Sequence
  source: /note="Description of Artificial Sequence: Synthetic polypeptide"
  source: /note="Heavy Chain of 19A3 IgG histidine scanning variant #31"
QVQLQQWGAGLLKPSETLSLTCAVYGRSFSSYYWSWIRQPPGKGLEWIGDIQHSGSTNYNPSLKSRVTISVDTSKNQFSLKLSSVTAADTAVYYCAHTFYDILTGYYPLGYWGPGTLVTVSS

SEQ ID NO: 528 - protein, 122 aa, Artificial Sequence
  source: /note="Description of Artificial Sequence: Synthetic polypeptide"
  source: /note="Heavy Chain of 19A3 IgG histidine scanning variant #32"
QVQLQQWGAGLLKPSETLSLTCAVYGRSFSSYYWSWIRQPPGKGLEWIGDIQHSGSTNYNPSLKSRVTISVDTSKNQFSLKLSSVTAADTAVYYCAGHFYDILTGYYPLGYWGPGTLVTVSS

SEQ ID NO: 529 - protein, 122 aa, Artificial Sequence
  source: /note="Description of Artificial Sequence: Synthetic polypeptide"
  source: /note="Heavy Chain of 19A3 IgG histidine scanning variant #33"
QVQLQQWGAGLLKPSETLSLTCAVYGRSFSSYYWSWIRQPPGKGLEWIGDIQHSGSTNYNPSLKSRVTISVDTSKNQFSLKLSSVTAADTAVYYCAGTHYDILTGYYPLGYWGPGTLVTVSS

SEQ ID NO: 530 - protein, 122 aa, Artificial Sequence
  source: /note="Description of Artificial Sequence: Synthetic polypeptide"
  source: /note="Heavy Chain of 19A3 IgG histidine scanning variant #34"
QVQLQQWGAGLLKPSETLSLTCAVYGRSFSSYYWSWIRQPPGKGLEWIGDIQHSGSTNYNPSLKSRVTISVDTSKNQFSLKLSSVTAADTAVYYCAGTFHDILTGYYPLGYWGPGTLVTVSS

SEQ ID NO: 531 - protein, 122 aa, Artificial Sequence
  source: /note="Description of Artificial Sequence: Synthetic polypeptide"
  source: /note="Heavy Chain of 19A3 IgG histidine scanning variant #35"
QVQLQQWGAGLLKPSETLSLTCAVYGRSFSSYYWSWIRQPPGKGLEWIGDIQHSGSTNYNPSLKSRVTISVDTSKNQFSLKLSSVTAADTAVYYCAGTFYHILTGYYPLGYWGPGTLVTVSS

SEQ ID NO: 532 - protein, 122 aa, Artificial Sequence
  source: /note="Description of Artificial Sequence: Synthetic polypeptide"
  source: /note="Heavy Chain of 19A3 IgG histidine scanning variant #36"
QVQLQQWGAGLLKPSETLSLTCAVYGRSFSSYYWSWIRQPPGKGLEWIGDIQHSGSTNYNPSLKSRVTISVDTSKNQFSLKLSSVTAADTAVYYCAGTFYDHLTGYYPLGYWGPGTLVTVSS

SEQ ID NO: 533 - protein, 122 aa, Artificial Sequence
  source: /note="Description of Artificial Sequence: Synthetic polypeptide"
  source: /note="Heavy Chain of 19A3 IgG histidine scanning variant #37"
QVQLQQWGAGLLKPSETLSLTCAVYGRSFSSYYWSWIRQPPGKGLEWIGDIQHSGSTNYNPSLKSRVTISVDTSKNQFSLKLSSVTAADTAVYYCAGTFYDIHTGYYPLGYWGPGTLVTVSS

SEQ ID NO: 534 - protein, 122 aa, Artificial Sequence
  source: /note="Description of Artificial Sequence: Synthetic polypeptide"
  source: /note="Heavy Chain of 19A3 IgG histidine scanning variant #38"
QVQLQQWGAGLLKPSETLSLTCAVYGRSFSSYYWSWIRQPPGKGLEWIGDIQHSGSTNYNPSLKSRVTISVDTSKNQFSLKLSSVTAADTAVYYCAGTFYDILHGYYPLGYWGPGTLVTVSS

SEQ ID NO: 535 - protein, 122 aa, Artificial Sequence
  source: /note="Description of Artificial Sequence: Synthetic polypeptide"
  source: /note="Heavy Chain of 19A3 IgG histidine scanning variant #39"
QVQLQQWGAGLLKPSETLSLTCAVYGRSFSSYYWSWIRQPPGKGLEWIGDIQHSGSTNYNPSLKSRVTISVDTSKNQFSLKLSSVTAADTAVYYCAGTFYDILTHYYPLGYWGPGTLVTVSS

SEQ ID NO: 536 - protein, 122 aa, Artificial Sequence
  source: /note="Description of Artificial Sequence: Synthetic polypeptide"
  source: /note="Heavy Chain of 19A3 IgG histidine scanning variant #40"
QVQLQQWGAGLLKPSETLSLTCAVYGRSFSSYYWSWIRQPPGKGLEWIGDIQHSGSTNYNPSLKSRVTISVDTSKNQFSLKLSSVTAADTAVYYCAGTFYDILTGHYPLGYWGPGTLVTVSS

SEQ ID NO: 537 - protein, 122 aa, Artificial Sequence
  source: /note="Description of Artificial Sequence: Synthetic polypeptide"
  source: /note="Heavy Chain of 19A3 IgG histidine scanning variant #41"
QVQLQQWGAGLLKPSETLSLTCAVYGRSFSSYYWSWIRQPPGKGLEWIGDIQHSGSTNYNPSLKSRVTISVDTSKNQFSLKLSSVTAADTAVYYCAGTFYDILTGYHPLGYWGPGTLVTVSS

SEQ ID NO: 538 - protein, 122 aa, Artificial Sequence
  source: /note="Description of Artificial Sequence: Synthetic polypeptide"
  source: /note="Heavy Chain of 19A3 IgG histidine scanning variant #42"
QVQLQQWGAGLLKPSETLSLTCAVYGRSFSSYYWSWIRQPPGKGLEWIGDIQHSGSTNYNPSLKSRVTISVDTSKNQFSLKLSSVTAADTAVYYCAGTFYDILTGYYHLGYWGPGTLVTVSS

SEQ ID NO: 539 - protein, 122 aa, Artificial Sequence
  source: /note="Description of Artificial Sequence: Synthetic polypeptide"
  source: /note="Heavy Chain of 19A3 IgG histidine scanning variant #43"
QVQLQQWGAGLLKPSETLSLTCAVYGRSFSSYYWSWIRQPPGKGLEWIGDIQHSGSTNYNPSLKSRVTISVDTSKNQFSLKLSSVTAADTAVYYCAGTFYDILTGYYPHGYWGPGTLVTVSS

SEQ ID NO: 540 - protein, 122 aa, Artificial Sequence
  source: /note="Description of Artificial Sequence: Synthetic polypeptide"
  source: /note="Heavy Chain of 19A3 IgG histidine scanning variant #44"
QVQLQQWGAGLLKPSETLSLTCAVYGRSFSSYYWSWIRQPPGKGLEWIGDIQHSGSTNYNPSLKSRVTISVDTSKNQFSLKLSSVTAADTAVYYCAGTFYDILTGYYPLHYWGPGTLVTVSS

SEQ ID NO: 541 - protein, 122 aa, Artificial Sequence
  source: /note="Description of Artificial Sequence: Synthetic polypeptide"
  source: /note="Heavy Chain of 19A3 IgG histidine scanning variant #45"
QVQLQQWGAGLLKPSETLSLTCAVYGRSFSSYYWSWIRQPPGKGLEWIGDIQHSGSTNYNPSLKSRVTISVDTSKNQFSLKLSSVTAADTAVYYCAGTFYDILTGYYPLGHWGPGTLVTVSS

SEQ ID NO: 542 - protein, 106 aa, Artificial Sequence
  source: /note="Description of Artificial Sequence: Synthetic polypeptide"
  source: /note="Light Chain of 19A3 IgG histidine scanning variant #1"
EIVLTQSPATLSLSPGERATLSCHASQSVSSYLAWYQQKPGQAPRLLIYDASNRATGIPARFSGSGSGTDFTLTISSLEPEDFAVYYCQQRSNWPTFGQGTKVEIK

SEQ ID NO: 543 - protein, 106 aa, Artificial Sequence
  source: /note="Description of Artificial Sequence: Synthetic polypeptide"
  source: /note="Light Chain of 19A3 IgG histidine scanning variant #2"
EIVLTQSPATLSLSPGERATLSCRHSQSVSSYLAWYQQKPGQAPRLLIYDASNRATGIPARFSGSGSGTDFTLTISSLEPEDFAVYYCQQRSNWPTFGQGTKVEIK

SEQ ID NO: 544 - protein, 106 aa, Artificial Sequence
  source: /note="Description of Artificial Sequence: Synthetic polypeptide"
  source: /note="Light Chain of 19A3 IgG histidine scanning variant #3"
EIVLTQSPATLSLSPGERATLSCRAHQSVSSYLAWYQQKPGQAPRLLIYDASNRATGIPARFSGSGSGTDFTLTISSLEPEDFAVYYCQQRSNWPTFGQGTKVEIK

SEQ ID NO: 545 - protein, 106 aa, Artificial Sequence
  source: /note="Description of Artificial Sequence: Synthetic polypeptide"
  source: /note="Light Chain of 19A3 IgG histidine scanning variant #4"
EIVLTQSPATLSLSPGERATLSCRASHSVSSYLAWYQQKPGQAPRLLIYDASNRATGIPARFSGSGSGTDFTLTISSLEPEDFAVYYCQQRSNWPTFGQGTKVEIK

SEQ ID NO: 546 - protein, 106 aa, Artificial Sequence
  source: /note="Description of Artificial Sequence: Synthetic polypeptide"
  source: /note="Light Chain of 19A3 IgG histidine scanning variant #5"
EIVLTQSPATLSLSPGERATLSCRASQHVSSYLAWYQQKPGQAPRLLIYDASNRATGIPARFSGSGSGTDFTLTISSLEPEDFAVYYCQQRSNWPTFGQGTKVEIK

SEQ ID NO: 547 - protein, 106 aa, Artificial Sequence
  source: /note="Description of Artificial Sequence: Synthetic polypeptide"
  source: /note="Light Chain of 19A3 IgG histidine scanning variant #6"
EIVLTQSPATLSLSPGERATLSCRASQSHSSYLAWYQQKPGQAPRLLIYDASNRATGIPARFSGSGSGTDFTLTISSLEPEDFAVYYCQQRSNWPTFGQGTKVEIK

SEQ ID NO: 548 - protein, 106 aa, Artificial Sequence
  source: /note="Description of Artificial Sequence: Synthetic polypeptide"
  source: /note="Light Chain of 19A3 IgG histidine scanning variant #7"
EIVLTQSPATLSLSPGERATLSCRASQSVHSYLAWYQQKPGQAPRLLIYDASNRATGIPARFSGSGSGTDFTLTISSLEPEDFAVYYCQQRSNWPTFGQGTKVEIK

SEQ ID NO: 549 - protein, 106 aa, Artificial Sequence
  source: /note="Description of Artificial Sequence: Synthetic polypeptide"
  source: /note="Light Chain of 19A3 IgG histidine scanning variant #8"
EIVLTQSPATLSLSPGERATLSCRASQSVSHYLAWYQQKPGQAPRLLIYDASNRATGIPARFSGSGSGTDFTLTISSLEPEDFAVYYCQQRSNWPTFGQGTKVEIK

SEQ ID NO: 550 - protein, 106 aa, Artificial Sequence
  source: /note="Description of Artificial Sequence: Synthetic polypeptide"
  source: /note="Light Chain of 19A3 IgG histidine scanning variant #9"
EIVLTQSPATLSLSPGERATLSCRASQSVSSHLAWYQQKPGQAPRLLIYDASNRATGIPARFSGSGSGTDFTLTISSLEPEDFAVYYCQQRSNWPTFGQGTKVEIK

SEQ ID NO: 551 - protein, 106 aa, Artificial Sequence
  source: /note="Description of Artificial Sequence: Synthetic polypeptide"
  source: /note="Light Chain of 19A3 IgG histidine scanning variant #10"
EIVLTQSPATLSLSPGERATLSCRASQSVSSYHAWYQQKPGQAPRLLIYDASNRATGIPARFSGSGSGTDFTLTISSLEPEDFAVYYCQQRSNWPTFGQGTKVEIK

SEQ ID NO: 552 - protein, 106 aa, Artificial Sequence
  source: /note="Description of Artificial Sequence: Synthetic polypeptide"
  source: /note="Light Chain of 19A3 IgG histidine scanning variant #11"
EIVLTQSPATLSLSPGERATLSCRASQSVSSYLHWYQQKPGQAPRLLIYDASNRATGIPARFSGSGSGTDFTLTISSLEPEDFAVYYCQQRSNWPTFGQGTKVEIK

SEQ ID NO: 553 - protein, 106 aa, Artificial Sequence
  source: /note="Description of Artificial Sequence: Synthetic polypeptide"
  source: /note="Light Chain of 19A3 IgG histidine scanning variant #12"
EIVLTQSPATLSLSPGERATLSCRASQSVSSYLAWYQQKPGQAPRLLIYHASNRATGIPARFSGSGSGTDFTLTISSLEPEDFAVYYCQQRSNWPTFGQGTKVEIK

SEQ ID NO: 554 - protein, 106 aa, Artificial Sequence
  source: /note="Description of Artificial Sequence: Synthetic polypeptide"
  source: /note="Light Chain of 19A3 IgG histidine scanning variant #13"
EIVLTQSPATLSLSPGERATLSCRASQSVSSYLAWYQQKPGQAPRLLIYDHSNRATGIPARFSGSGSGTDFTLTISSLEPEDFAVYYCQQRSNWPTFGQGTKVEIK

SEQ ID NO: 555 - protein, 106 aa, Artificial Sequence
  source: /note="Description of Artificial Sequence: Synthetic polypeptide"
  source: /note="Light Chain of 19A3 IgG histidine scanning variant #14"
EIVLTQSPATLSLSPGERATLSCRASQSVSSYLAWYQQKPGQAPRLLIYDAHNRATGIPARFSGSGSGTDFTLTISSLEPEDFAVYYCQQRSNWPTFGQGTKVEIK

SEQ ID NO: 556 - protein, 106 aa, Artificial Sequence
  source: /note="Description of Artificial Sequence: Synthetic polypeptide"
  source: /note="Light Chain of 19A3 IgG histidine scanning variant #15"
EIVLTQSPATLSLSPGERATLSCRASQSVSSYLAWYQQKPGQAPRLLIYDASHRATGIPARFSGSGSGTDFTLTISSLEPEDFAVYYCQQRSNWPTFGQGTKVEIK

SEQ ID NO: 557 - protein, 106 aa, Artificial Sequence
  source: /note="Description of Artificial Sequence: Synthetic polypeptide"
  source: /note="Light Chain of 19A3 IgG histidine scanning variant #16"
EIVLTQSPATLSLSPGERATLSCRASQSVSSYLAWYQQKPGQAPRLLIYDASNHATGIPARFSGSGSGTDFTLTISSLEPEDFAVYYCQQRSNWPTFGQGTKVEIK

SEQ ID NO: 558 - protein, 106 aa, Artificial Sequence
  source: /note="Description of Artificial Sequence: Synthetic polypeptide"
  source: /note="Light Chain of 19A3 IgG histidine scanning variant #17"
EIVLTQSPATLSLSPGERATLSCRASQSVSSYLAWYQQKPGQAPRLLIYDASNRHTGIPARFSGSGSGTDFTLTISSLEPEDFAVYYCQQRSNWPTFGQGTKVEIK

SEQ ID NO: 559 - protein, 106 aa, Artificial Sequence
  source: /note="Description of Artificial Sequence: Synthetic polypeptide"
  source: /note="Light Chain of 19A3 IgG histidine scanning variant #18"
EIVLTQSPATLSLSPGERATLSCRASQSVSSYLAWYQQKPGQAPRLLIYDASNRAHGIPARFSGSGSGTDFTLTISSLEPEDFAVYYCQQRSNWPTFGQGTKVEIK

SEQ ID NO: 560 - protein, 106 aa, Artificial Sequence
  source: /note="Description of Artificial Sequence: Synthetic polypeptide"
  source: /note="Light Chain of 19A3 IgG histidine scanning variant #19"
EIVLTQSPATLSLSPGERATLSCRASQSVSSYLAWYQQKPGQAPRLLIYDASNRATGIPARFSGSGSGTDFTLTISSLEPEDFAVYYCHQRSNWPTFGQGTKVEIK

SEQ ID NO: 561 - protein, 106 aa, Artificial Sequence
  source: /note="Description of Artificial Sequence: Synthetic polypeptide"
  source: /note="Light Chain of 19A3 IgG histidine scanning variant #20"
EIVLTQSPATLSLSPGERATLSCRASQSVSSYLAWYQQKPGQAPRLLIYDASNRATGIPARFSGSGSGTDFTLTISSLEPEDFAVYYCQHRSNWPTFGQGTKVEIK

SEQ ID NO: 562 - protein, 106 aa, Artificial Sequence
  source: /note="Description of Artificial Sequence: Synthetic polypeptide"
  source: /note="Light Chain of 19A3 IgG histidine scanning variant #21"
EIVLTQSPATLSLSPGERATLSCRASQSVSSYLAWYQQKPGQAPRLLIYDASNRATGIPARFSGSGSGTDFTLTISSLEPEDFAVYYCQQHSNWPTFGQGTKVEIK

SEQ ID NO: 563 - protein, 106 aa, Artificial Sequence
  source: /note="Description of Artificial Sequence: Synthetic polypeptide"
  source: /note="Light Chain of 19A3 IgG histidine scanning variant #22"
EIVLTQSPATLSLSPGERATLSCRASQSVSSYLAWYQQKPGQAPRLLIYDASNRATGIPARFSGSGSGTDFTLTISSLEPEDFAVYYCQQRHNWPTFGQGTKVEIK

SEQ ID NO: 564 - protein, 106 aa, Artificial Sequence
  source: /note="Description of Artificial Sequence: Synthetic polypeptide"
  source: /note="Light Chain of 19A3 IgG histidine scanning variant #23"
EIVLTQSPATLSLSPGERATLSCRASQSVSSYLAWYQQKPGQAPRLLIYDASNRATGIPARFSGSGSGTDFTLTISSLEPEDFAVYYCQQRSHWPTFGQGTKVEIK

SEQ ID NO: 565 - protein, 106 aa, Artificial Sequence
  source: /note="Description of Artificial Sequence: Synthetic polypeptide"
  source: /note="Light Chain of 19A3 IgG histidine scanning variant #24"
EIVLTQSPATLSLSPGERATLSCRASQSVSSYLAWYQQKPGQAPRLLIYDASNRATGIPARFSGSGSGTDFTLTISSLEPEDFAVYYCQQRSNHPTFGQGTKVEIK

SEQ ID NO: 566 - protein, 106 aa, Artificial Sequence
  source: /note="Description of Artificial Sequence: Synthetic polypeptide"
  source: /note="Light Chain of 19A3 IgG histidine scanning variant #25"
EIVLTQSPATLSLSPGERATLSCRASQSVSSYLAWYQQKPGQAPRLLIYDASNRATGIPARFSGSGSGTDFTLTISSLEPEDFAVYYCQQRSNWHTFGQGTKVEIK

SEQ ID NO: 567 - protein, 106 aa, Artificial Sequence
  source: /note="Description of Artificial Sequence: Synthetic polypeptide"
  source: /note="Light Chain of 19A3 IgG histidine scanning variant #26"
EIVLTQSPATLSLSPGERATLSCRASQSVSSYLAWYQQKPGQAPRLLIYDASNRATGIPARFSGSGSGTDFTLTISSLEPEDFAVYYCQQRSNWPHFGQGTKVEIK

1. A pharmaceutical composition comprising an effective amount of an antigen-binding protein construct (ABPC) comprising:
a first antigen-binding domain that is capable of specifically binding CD22 or an epitope of CD22 presented on the surface of a target mammalian cell,
wherein:
(a) the dissociation rate of the first antigen-binding domain at a pH of about 4.0 to about 6.5 is faster than the dissociation rate at a pH of about 7.0 to about 8.0; or
(b) the dissociation constant (KD) of the first antigen-binding domain at a pH of about 4.0 to about 6.5 is greater than the KD at a pH of about 7.0 to about 8.0.

2. The pharmaceutical composition of claim 1, wherein the ABPC is degraded in the target mammalian cell following internalization of the ABPC by the target mammalian cell.

3. The pharmaceutical composition of claim 1, wherein the ABPC further comprises a conjugated toxin, radioisotope, drug, or small molecule.

4. A pharmaceutical composition comprising an effective amount of an antigen-binding protein construct (ABPC) comprising:
a first antigen-binding domain that is capable of specifically binding CD22 or an epitope of CD22 presented on the surface of a target mammalian cell; and
a conjugated toxin, radioisotope, drug, or small molecule,
wherein:
(a) the dissociation rate of the first antigen-binding domain at a pH of about 4.0 to about 6.5 is faster than the dissociation rate at a pH of about 7.0 to about 8.0; or
the dissociation constant (KD) of the first antigen-binding domain at a pH of about 4.0 to about 6.5 is greater than the KD at a pH of about 7.0 to about 8.0; and
(b) the composition provides for one or more of:
an increase in toxin liberation in the target mammalian cell as compared to a composition comprising the same amount of a control ABPC;
an increase in target mammalian cell killing as compared to a composition comprising the same amount of a control ABPC; and
an increase in endolysosomal delivery in the target mammalian cell as compared to a composition comprising the same amount of a control ABPC.

5. The pharmaceutical composition of claim 1, wherein the first antigen-binding domain comprises one of (a) through (f):
(a) a heavy chain variable domain of inotuzumab with one or more amino acids substituted with a histidine, wherein the heavy chain variable domain of inotuzumab comprises SEQ ID NO: 1; and/or
a light chain variable domain of inotuzumab with one or more amino acids substituted with a histidine, wherein the light chain variable domain of inotuzumab comprises SEQ ID NO: 2;
(b) a heavy chain variable domain of pinatuzumab with one or more amino acids substituted with a histidine, wherein the heavy chain variable domain of pinatuzumab comprises SEQ ID NO: 143; and/or
a light chain variable domain of pinatuzumab with one or more amino acids substituted with a histidine, wherein the light chain variable domain of pinatuzumab comprises SEQ ID NO: 144;
(c) a heavy chain variable domain of TRPH-222 with one or more amino acids substituted with a histidine, wherein the heavy chain variable domain of TRPH-222 comprises SEQ ID NO: 268; and/or
a light chain variable domain of TRPH-222 with one or more amino acids substituted with a histidine, wherein the light chain variable domain of TRPH-222 comprises SEQ ID NO: 269;
(d) a heavy chain variable domain of ADCT-602 with one or more amino acids substituted with a histidine, wherein the heavy chain variable domain of ADCT-602 comprises SEQ ID NO: 366; and/or
a light chain variable domain of ADCT-602 with one or more amino acids substituted with a histidine, wherein the light chain variable domain of ADCT-602 comprises SEQ ID NO: 367;
(e) a heavy chain variable domain of 12C5 with one or more amino acids substituted with a histidine, wherein the heavy chain variable domain of 12C5 comprises SEQ ID NO: 410; and/or
a light chain variable domain of 12C5 with one or more amino acids substituted with a histidine, wherein the light chain variable domain of 12C5 comprises SEQ ID NO: 411; and
(f) a heavy chain variable domain of 19A3 with one or more amino acids substituted with a histidine, wherein the heavy chain variable domain of 19A3 comprises SEQ ID NO: 489; and/or
a light chain variable domain of 19A3 with one or more amino acids substituted with a histidine, wherein the light chain variable domain of 19A3 comprises SEQ ID NO: 490.

6. The pharmaceutical composition of claim 1, wherein the first CD22-binding domain comprises one of (a) through (f):
(a) a heavy chain variable domain comprising a CDR1, a CDR2, and a CDR3 of SEQ ID NOs: 3-5, respectively, with collectively a total of one or more amino acid positions in SEQ ID NOs: 3-5 substituted with a histidine; and/or
a light chain variable domain comprising a CDR1, a CDR2, and a CDR3 of SEQ ID NOs: 6-8, respectively, with collectively a total of one or more amino acid positions in SEQ ID NOs: 6-8 substituted with a histidine;
(b) a heavy chain variable domain comprising a CDR1, a CDR2, and a CDR3 of SEQ ID NOs: 145-147, respectively, with collectively a total of one or more amino acid positions in SEQ ID NOs: 145-147 substituted with a histidine; and/or
a light chain variable domain comprising a CDR1, a CDR2, and a CDR3 of SEQ ID NOs: 148-150, respectively, with collectively a total of one or more amino acid positions in SEQ ID NOs: 148-150 substituted with a histidine;
(c) a heavy chain variable domain comprising a CDR1, a CDR2, and a CDR3 of SEQ ID NOs: 270-272, respectively, with collectively a total of one or more amino acid positions in SEQ ID NOs: 270-272 substituted with a histidine; and/or
a light chain variable domain comprising a CDR1, a CDR2, and a CDR3 of SEQ ID NOs: 273-275, respectively, with collectively a total of one or more amino acid positions in SEQ ID NOs: 273-275 substituted with a histidine;
(d) a heavy chain variable domain comprising a CDR1, a CDR2, and a CDR3 of SEQ ID NOs: 368-370, respectively, with collectively a total of one or more amino acid positions in SEQ ID NOs: 368-370 substituted with a histidine; and/or
a light chain variable domain comprising a CDR1, a CDR2, and a CDR3 of SEQ ID NOs: 371-373, respectively, with collectively a total of one or more amino acid positions in SEQ ID NOs: 371-373 substituted with a histidine;
(e) a heavy chain variable domain comprising a CDR1, a CDR2, and a CDR3 of SEQ ID NOs: 412-414, respectively, with collectively a total of one or more amino acid positions in SEQ ID NOs: 412-414 substituted with a histidine; and/or
a light chain variable domain comprising a CDR1, a CDR2, and a CDR3 of SEQ ID NOs: 415-417, respectively, with collectively a total of one or more amino acid positions in SEQ ID NOs: 415-417 substituted with a histidine; and
(f) a heavy chain variable domain comprising a CDR1, a CDR2, and a CDR3 of SEQ ID NOs: 491-493, respectively, with collectively a total of one or more amino acid positions in SEQ ID NOs: 491-493 substituted with a histidine; and/or
a light chain variable domain comprising a CDR1, a CDR2, and a CDR3 of SEQ ID NOs: 494-496, respectively, with collectively a total of one or more amino acid positions in SEQ ID NOs: 494-496 substituted with a histidine.

7. The pharmaceutical composition of claim 1, wherein the first antigen-binding domain comprises one of (a) through (f):
(a) a heavy chain variable domain that is at least 90% identical to SEQ ID NO: 1, wherein the heavy chain variable domain includes a histidine at one or more positions in SEQ ID NO: 1 selected from the group consisting of: 27, 28, 31, 32, 33, 34, 50, 51, 52, 53, 55, 57, 59, 63, 97, 103, 104, and 110; and/or
a light chain variable domain that is at least 90% identical to SEQ ID NO: 2, wherein the light chain variable domain includes a histidine at one or more positions in SEQ ID NO: 2 selected from the group consisting of: 25, 26, 28, 29, 30, 33, 34, 35, 36, 37, 38, 39, 56, 95, and 97;
(b) a heavy chain variable domain that is at least 90% identical to SEQ ID NO: 143, wherein the heavy chain variable domain includes a histidine at one or more positions in SEQ ID NO: 143 selected from the group consisting of: 27, 28, 31, 34, 35, 50, 53, 55, 57, 59, 98, 101, 102, 104, 106, 107, and 108; and/or
a light chain variable domain that is at least 90% identical to SEQ ID NO: 144, wherein the light chain variable domain includes a histidine at one or more positions in SEQ ID NO: 144 selected from the group consisting of: 25, 29, 30, 36, 37, 38, 39, 55, 94, 95, 97, 99, 100, 101, and 102;
(c) a heavy chain variable domain that is at least 90% identical to SEQ ID NO: 268, wherein the heavy chain variable domain includes a histidine at one or more positions in SEQ ID NO: 268 selected from the group consisting of: 32, 33, 54, 55, 97, 98, 100, 102, 106, 107, and 111; and/or
a light chain variable domain that is at least 90% identical to SEQ ID NO: 269, wherein the light chain variable domain includes a histidine at one or more positions in SEQ ID NO: 269 selected from the group consisting of 53 and 91;
(d) a heavy chain variable domain that is at least 90% identical to SEQ ID NO: 366, wherein the heavy chain variable domain includes a histidine at one or more positions in SEQ ID NO: 366 selected from the group consisting of: 32 and 33; and
a light chain variable domain that is at least 90% identical to SEQ ID NO: 367;
(e) a heavy chain variable domain that is at least 90% identical to SEQ ID NO: 410, wherein the heavy chain variable domain includes a histidine at one or more positions in SEQ ID NO: 410 selected from the group consisting of: 27, 29, 32, 50, 52, 53, 54, 55, 58, 59, 99, 100, 102, 103, and 107; and/or
a light chain variable domain that is at least 90% identical to SEQ ID NO: 411, wherein the light chain variable domain includes a histidine at one or more positions in SEQ ID NO: 411 selected from the group consisting of: 24, 28, 29, 30, 34, 35, 52, 53, 57, 91, 92, 93, and 99; and
(f) a heavy chain variable domain that is at least 90% identical to SEQ ID NO: 489, wherein the heavy chain variable domain includes a histidine at one or more positions in SEQ ID NO: 489 selected from the group consisting of 24, 26, 27, 31, 32, 34, 97, 98, 100, 102, 103, 105, 110, and 111; and/or
a light chain variable domain that is at least 90% identical to SEQ ID NO: 490, wherein the light chain variable domain includes a histidine at one or more positions in SEQ ID NO: 490 selected from the group consisting of: 55 and 56.

8. The pharmaceutical composition of claim 1, wherein the first antigen-binding domain comprises one of (a) through (f):
(a) a light chain variable domain of SEQ ID NO: 2, SEQ ID NO: 53, SEQ ID NO: 54, SEQ ID NO: 56, SEQ ID NO: 57, SEQ ID NO: 58, SEQ ID NO: 61, SEQ ID NO: 62, SEQ ID NO: 63, SEQ ID NO: 64, SEQ ID NO: 65, SEQ ID NO: 66, SEQ ID NO: 67, SEQ ID NO: 69, SEQ ID NO: 76, SEQ ID NO: 78, SEQ ID NO: 79, SEQ ID NO: 139, SEQ ID NO: 140, SEQ ID NO: 141, or SEQ ID NO: 142, and/or
a heavy chain variable domain of SEQ ID NO: 1, SEQ ID NO: 14, SEQ ID NO: 15, SEQ ID NO: 18, SEQ ID NO: 19, SEQ ID NO: 20, SEQ ID NO: 21, SEQ ID NO: 22, SEQ ID NO: 23, SEQ ID NO: 24, SEQ ID NO: 25, SEQ ID NO: 26, SEQ ID NO: 28, SEQ ID NO: 30, SEQ ID NO: 32, SEQ ID NO: 36, SEQ ID NO: 38, SEQ ID NO: 44, SEQ ID NO: 45, SEQ ID NO: 51, SEQ ID NO: 84, SEQ ID NO: 85, SEQ ID NO: 86, SEQ ID NO: 87, SEQ ID NO: 88, SEQ ID NO: 89, SEQ ID NO: 90, SEQ ID NO: 94, SEQ ID NO: 95, SEQ ID NO: 96, SEQ ID NO: 97, SEQ ID NO: 98, or SEQ ID NO: 99, SEQ ID NO: 100, SEQ ID NO: 101, SEQ ID NO: 103, SEQ ID NO: 104, SEQ ID NO: 105, SEQ ID NO: 106, SEQ ID NO: 107, SEQ ID NO: 108, SEQ ID NO: 109, SEQ ID NO: 110, SEQ ID NO: 111, SEQ ID NO: 112, SEQ ID NO: 113, SEQ ID NO: 114, SEQ ID NO: 115, SEQ ID NO: 117, SEQ ID NO: 118, SEQ ID NO: 119, SEQ ID NO: 120, SEQ ID NO: 121, SEQ ID NO: 123, SEQ ID NO: 124, SEQ ID NO: 125, SEQ ID NO: 126, SEQ ID NO: 127, SEQ ID NO: 128, SEQ ID NO: 129, SEQ ID NO: 130, SEQ ID NO: 131, SEQ ID NO: 132, SEQ ID NO: 133, SEQ ID NO: 134, SEQ ID NO: 135, SEQ ID NO: 136, SEQ ID NO: 137, or SEQ ID NO: 138,
wherein the first antigen-binding domain does not comprise (i) a light chain variable domain of SEQ ID NO: 2 and a heavy chain variable domain of SEQ ID NO: 1; (ii) a light chain variable domain of SEQ ID NO: 2 and heavy chain variable domain that is not one of SEQ ID NOs: 14, 15, 18-26, 28, 30, 32, 36, 38, 44, 45, 51, 84, 85-90, 94-101, 103-115, 117-121, and 123-138; or (iii) a heavy chain variable domain of SEQ ID NO: 1 and a light chain variable domain that is not one of SEQ ID NOs: 53, 54, 56-58, 61-67, 69, 76, 78, 79, and 139-142;
(b) a light chain variable domain of SEQ ID NO: 144, SEQ ID NO: 192, SEQ ID NO: 196, SEQ ID NO: 197, SEQ ID NO: 203, SEQ ID NO: 204, SEQ ID NO: 205, SEQ ID NO: 206, SEQ ID NO: 207, SEQ ID NO: 214, SEQ ID NO: 215, SEQ ID NO: 217, SEQ ID NO: 219, SEQ ID NO: 220, SEQ ID NO: 221, or SEQ ID NO: 222, and/or
a heavy chain variable domain of SEQ ID NO: 143, SEQ ID NO: 152, SEQ ID NO: 153, SEQ ID NO: 156, SEQ ID NO: 159, SEQ ID NO: 160, SEQ ID NO: 161, SEQ ID NO: 164, SEQ ID NO: 166, SEQ ID NO: 168, SEQ ID NO: 170, SEQ ID NO: 179, SEQ ID NO: 182, SEQ ID NO: 183, SEQ ID NO: 185, SEQ ID NO: 187, SEQ ID NO: 188, SEQ ID NO: 189, SEQ ID NO: 223, SEQ ID NO: 224, SEQ ID NO: 225, SEQ ID NO: 226, SEQ ID NO: 227, SEQ ID NO: 228, SEQ ID NO: 229, SEQ ID NO: 230, SEQ ID NO: 231, SEQ ID NO: 233, SEQ ID NO: 238, SEQ ID NO: 239, SEQ ID NO: 240, or SEQ ID NO: 241,
wherein the first antigen-binding domain does not comprise (i) a light chain variable domain of SEQ ID NO: 144 and a heavy chain variable domain of SEQ ID NO: 143; (ii) a light chain variable domain of SEQ ID NO: 144 and heavy chain variable domain that is not one of SEQ ID NOs: 152, 153, 156, 159-161, 164, 166, 168, 170, 179, 182, 183, 185, 187-189, 223-231, 233, and 238-241; or (iii) a heavy chain variable domain of SEQ ID NO: 143 and a light chain variable domain that is not one of SEQ ID NOs: 192, 196, 197, 203-207, 214, 215, 217, and 219-222;
(c) a light chain variable domain of SEQ ID NO: 269, SEQ ID NO: 333, SEQ ID NO: 335, or SEQ ID NO: 339, and/or
a heavy chain variable domain of SEQ ID NO: 268, SEQ ID NO: 282, SEQ ID NO: 283, SEQ ID NO: 290, SEQ ID NO: 291, SEQ ID NO: 303, SEQ ID NO: 304, SEQ ID NO: 305, SEQ ID NO: 306, SEQ ID NO: 308, SEQ ID NO: 312, SEQ ID NO: 313, SEQ ID NO: 317, SEQ ID NO: 346, SEQ ID NO: 348, SEQ ID NO: 349, SEQ ID NO: 350, SEQ ID NO: 351, SEQ ID NO: 352, SEQ ID NO: 353, SEQ ID NO: 354, SEQ ID NO: 355, SEQ ID NO: 357, SEQ ID NO: 358, or SEQ ID NO: 363,
wherein the first antigen-binding domain does not comprise (i) a light chain variable domain of SEQ ID NO: 269 and a heavy chain variable domain of SEQ ID NO: 268; (ii) a light chain variable domain of SEQ ID NO: 269 and heavy chain variable domain that is not one of SEQ ID NOs: 282, 283, 290, 291, 303-306, 308, 312, 313, 317, 346, 348-355, 357, 358, and 363; or (iii) a heavy chain variable domain of SEQ ID NO: 268 and a light chain variable domain that is not one of SEQ ID NOs: 333, 335, and 339;
(d) a light chain variable domain of SEQ ID NO: 367, and/or
a heavy chain variable domain of SEQ ID NO: 366, SEQ ID NO: 380, or SEQ ID NO: 381,
wherein the first antigen-binding domain does not comprise (i) a light chain variable domain of SEQ ID NO: 367 and a heavy chain variable domain of SEQ ID NO: 366; or (ii) a light chain variable domain of SEQ ID NO: 367 and heavy chain variable domain that is not one of SEQ ID NOs: 380 and 381;
(e) a light chain variable domain of SEQ ID NO: 411, SEQ ID NO: 459, SEQ ID NO: 463, SEQ ID NO: 464, SEQ ID NO: 465, SEQ ID NO: 469, SEQ ID NO: 470, SEQ ID NO: 472, SEQ ID NO: 473, SEQ ID NO: 477, SEQ ID NO: 479, SEQ ID NO: 480, SEQ ID NO: 481 or SEQ ID NO: 487, and/or
a heavy chain variable domain of SEQ ID NO: 410, SEQ ID NO: 422, SEQ ID NO: 424, SEQ ID NO: 427, SEQ ID NO: 431, SEQ ID NO: 433, SEQ ID NO: 434, SEQ ID NO: 435, SEQ ID NO: 436, SEQ ID NO: 439, SEQ ID NO: 440, SEQ ID NO: 448, SEQ ID NO: 449, SEQ ID NO: 451, SEQ ID NO: 452, or SEQ ID NO: 456,
wherein the first antigen-binding domain does not comprise (i) a light chain variable domain of SEQ ID NO: 411 and a heavy chain variable domain of SEQ ID NO: 410; (ii) a light chain variable domain of SEQ ID NO: 411 and heavy chain variable domain that is not one of SEQ ID NOs: 422, 424, 427, 431, 433-436, 439, 440, 448, 449, 451, 452, and 456; or (iii) a heavy chain variable domain of SEQ ID NO: 410 and a light chain variable domain that is not one of SEQ ID NOs: 459, 463-465, 469, 470, 472, 473, 477, 479-481, or 487; and
(f) a light chain variable domain of SEQ ID NO: 490, SEQ ID NO: 558, or SEQ ID NO: 559, and/or
a heavy chain variable domain of SEQ ID NO: 489, SEQ ID NO: 498, SEQ ID NO: 500, SEQ ID NO: 501, SEQ ID NO: 505, SEQ ID NO: 506, SEQ ID NO: 508, SEQ ID NO: 527, SEQ ID NO: 528, SEQ ID NO: 530, SEQ ID NO: 532, SEQ ID NO: 533, SEQ ID NO: 535, SEQ ID NO: 540, or SEQ ID NO: 541,
wherein the first antigen-binding domain does not comprise (i) a light chain variable domain of SEQ ID NO: 490 and a heavy chain variable domain of SEQ ID NO: 489; (ii) a light chain variable domain of SEQ ID NO: 490 and heavy chain variable domain that is not one of SEQ ID NOs: 498, 500, 501, 505, 506, 508, 527, 528, 530, 532, 533, 535, 540, and 541; or (iii) a heavy chain variable domain of SEQ ID NO: 489 and a light chain variable domain that is not one of SEQ ID NOs: 558 and 559.

9. The pharmaceutical composition of claim 1, wherein the composition provides for:
an increase in toxin liberation in the target mammalian cell as compared to a composition comprising the same amount of a control ABPC; and/or
an increase in target mammalian cell killing as compared to a composition comprising the same amount of a control ABPC.

10. The pharmaceutical composition of claim 1, wherein the composition provides for an increase in endolysosomal delivery in the target mammalian cell as compared to a composition comprising the same amount of a control ABPC.

11. The pharmaceutical composition of claim 1, wherein the composition:
results in a less of a reduction in the level of CD22 presented on the surface of the target mammalian cell as compared to a composition comprising the same amount of a control ABPC; or
does not result in a detectable reduction in the level of CD22 presented on the surface of the target mammalian cell.

12. The pharmaceutical composition of claim 1, wherein the target mammalian cell is a cancer cell.

13. The pharmaceutical composition of claim 1, wherein the ABPC is cytotoxic or cytostatic to the target mammalian cell.

14. (canceled)

15. The pharmaceutical composition of claim 1, wherein the ABPC comprises a single polypeptide.

16. The pharmaceutical composition of claim 15, wherein the antigen-binding domain is selected from the group consisting of: a VH domain, a VHH domain, a VNAR domain, and a scFv.

17. The pharmaceutical composition of claim 1, wherein the ABPC comprises two or more polypeptides.

18. The pharmaceutical composition of claim 17, wherein the ABPC is an antibody.

19. The pharmaceutical composition of claim 1, wherein the half-life of the ABPC in vivo is decreased as compared to the half-life of a control ABPC in vivo.

20. The pharmaceutical composition of claim 1, wherein the ABPC further comprises a second antigen-binding domain.

21. An antigen-binding protein construct (ABPC) comprising:
a first antigen-binding domain that is capable of specifically binding CD22 or an epitope of CD22 presented on the surface of a target mammalian cell,
wherein:
(a) the dissociation rate of the first antigen-binding domain at a pH of about 4.0 to about 6.5 is faster than the dissociation rate at a pH of about 7.0 to about 8.0; or
(b) the dissociation constant (KD) of the first antigen-binding domain at a pH of about 4.0 to about 6.5 is greater than the KD at a pH of about 7.0 to about 8.0.

22.-23. (canceled)

24. An antigen-binding protein construct (ABPC) comprising:
a first antigen-binding domain that is capable of specifically binding CD22 or an epitope of CD22 presented on the surface of a target mammalian cell; and
a conjugated toxin, radioisotope, drug, or small molecule,
wherein:
(a) the dissociation rate of the first antigen-binding domain at a pH of about 4.0 to about 6.5 is faster than the dissociation rate at a pH of about 7.0 to about 8.0; or
the dissociation constant (KD) of the first antigen-binding domain at a pH of about 4.0 to about 6.5 is greater than the KD at a pH of about 7.0 to about 8.0; and
(b) the composition provides for one or more of:
an increase in toxin liberation in the target mammalian cell as compared to a composition comprising the same amount of a control ABPC;
an increase in target mammalian cell killing as compared to a composition comprising the same amount of a control ABPC; and
an increase in endolysosomal delivery in the target mammalian cell as compared to a composition comprising the same amount of a control ABPC.

25.-40. (canceled)

41. A kit comprising at least one dose of the pharmaceutical composition of claim 1.

42. A method of treating a cancer characterized by having a population of cancer cells that have CD22 or an epitope of CD22 presented on their surface, the method comprising:
administering a therapeutically effective amount of the pharmaceutical composition of claim 1 to a subject identified as having a cancer characterized by having the population of cancer cells.

43. A method of reducing the volume of a tumor in a subject, wherein the tumor is characterized by having a population of cancer cells that have CD22 or an epitope of CD22 presented on their surface, the method comprising:
administering a therapeutically effective amount of the pharmaceutical composition of claim 1 to a subject identified as having a cancer characterized by having the population of cancer cells.

44. A method of inducing cell death in a cancer cell in a subject, wherein the cancer cell has CD22 or an epitope of CD22 presented on its surface, wherein the method comprises:
administering a therapeutically effective amount of the pharmaceutical composition of claim 1 to a subject identified as having a cancer characterized by having a population of the cancer cells.

45. A method of decreasing the risk of developing a metastasis or decreasing the risk of developing an additional metastasis in a subject having a cancer, wherein the cancer is characterized by having a population of cancer cells that have CD22 or an epitope of CD22 presented on their surface the method comprising:
administering a therapeutically effective amount of the pharmaceutical composition of claim 1 to a subject identified as having a cancer characterized by having the population of cancer cells.
